United States Patent Application Publication US 2026/0258423 A1 - sequence listing, part 50

SEQ ID NO: 301568 - DNA, 83257441 bp, Homo sapiens (residues 23,482,878-25,617,684 of 83,257,441)
  source 1..83257441: mol_type = genomic DNA
gtagaaactgcaagtggatatttggtcctctctgaggatttcgttggaaacgggataaactgcacagaactaaacagaaagcattctcagaaccttcttcgtgatgtttgcattcaactcacagtgttgaacctttctttgatagttcaggtttgaaacggtctttctgtagaaactgcaagtagatatttggacctctctgaggatttcgttggaaacgggataacccgcacagaactaaaacagaagcattcacagaaaactcttggtgacgactgagtttaactcacagagctgaacattcctttggatggagcagtttcgaaacacactattggtagaatgttcaagtggatatgtgggcctctctgaggatttcgttggaaacgggataaaccgcacagaactaaacagaagcattctcagaaactactttgtgatgattgcattcaagtcacagagttgaacattccctttgacagagcagtttggaaactctctttgtgtagaatctgcaagtggagatatggaccgctttgaggcctatggtagtaaaggaaatagcttcatataaaagctagacagtagccttctcagaaacttctttgtgatgcttgcattcaactcacagagttgaactttcctttcgagagagaagctttgaaacactctttttccagaatctgcaattggacatttggagggctttgaggcctgtggtggaaaaggaattatcttcccgtaaaagcctagatggaagcattgtcagaaacttctttgtgatgattgcattcaagtcacagagttgaaggttccttttcaaagagcagtttccaatcactctttctgtggaatctgcaagtggatatttggacctctttgaagatttcgttggaaacgggagaatcttcacagaaaagctaaacagaagcattctcagaaacttctctgtgatatttgtgttcaactcccagagtttcacattgcttctcatagagtagttctgaaacatgcttttcatagtgtctgcaagtggacatttggagcgctttcaggcctgtggtggaaaacgaattatggtcacataaaaactggagagaagccttctcagaaacttctctgtgatgattgcattcaactcatagagttgaaccctcctatgcatagagcagtgttgaaactctctttttgtggaatctgcaagcggatatgtggacctctccgaagatgtctttggaaacgggaatatcttcacataaaaactaaacagaagcattctcagaaacttcttggtgatgtttgcattcaaatcccagagttgaaccttcctttgagagttcaggtttgaaacactctttttgtaggatctgcaagtgtatatttgcaccactctgtggccttcgttcgaaacgggtacatcttcgcataaaatctagacagaagcattctcagaaaatactttgtgatgattgagttgaactcacagagctgaacattcctttggatggagcaggtttgagacacactttttgtagaatctacaagtggatatttggacctctctgaggatttctttggaaacgggataactgcacctaactaaacggaagcattctcagaaactgctttgtgatgattgcattcacctcacagagttgaacattcctattgatagagcagtttggaaacactcttgttgtggaatgtgcaagtggagatttggagcgctttgaggcctatggtagtaaaggtaatagcttcatagaaaaactagacagatgcattctcaggaactttttggtgatgtttgtattcaactcccagagttgaactttcctttggaaagagcagctatgaaacactctttttctagaatctgcaagtggacgtttggagggctttgtggtttgtggtggaaaaggaaatatcttcacctaaatactagatagaagcattctcagaagcttctctgtgatgactgcattcaactcacggagttgaacactccttttgagagcgcagttttgaaactctctttctgtggcatctgcaaggggacatgtagacctctttgaagatttcgttggaaacggaatcatcttcacataaaaactatacagaagcagtctcagaatcttctttgtgatgtttgcattcaaatcccagagttgaactttcctttcaaagttcacgtttgaaacactctttttgcaggatctacaagtggatatttggaccactctgtgtccttcgttcgaaacgggtatatcttcacacgacatctagacagaagctttctcagaaaattctttgggatgattgagtggaactcacagagctgaacattccttgcgatgtagcagtttagaaacacactttctgcagaatctgcaagtgcatatttggacctctctgaggaattcgttggaaacgggataatttcagctgactaaacagaagcattctcagaacttcttcgtgatgtctgcattcaactcacagtgtggaacctttctttgatagttcaggtttgaaacactctttttgtagaaactgcaaggggataattgcacttctttgaggcctaccgtagtaaaggaaataacttcctatagaaagaagacagaagaattctcagagccctcttcgtgatgtttgcattcaactcacagtgctgaacctttctttgatagtgcagctttgaaacactctttttgtagaaactgcaagtggatgtttggtcctctgctgaggatttcgttggaaacgggataaaccgcacagaactaaaacagaagcattctcagaaccttcttcgtgatgtttgcattcaactcacagtgttgaacctttctttgatagttcaggtttgaaacggtctttctgtagaaactgcaagtagatatttggacctctctgaggatttcgttggaaacgggataacccgcacagaactaaaacagaagcattcacagaaaactcttggtgacgactgagtttaactcacagagctgaacattcctttggatggagcagtttcgaaacacactatttgtagaatgtgcaagtggatatttaggcctctctgaggatttcgttggaaacgggataaaccgcacagaactaaacagaagcattctcagaaactactttgtgatgattgcattcaagtcacagagttgaacattccctttgacagagcagtttggaaactctctttgtgtagaatctgcaagtggagatatggaccgctttgaggcctatggtagtaaaggaaatagcttcatataaaagctagacagtagcattctcagaaacttctttgtgatgcttgcattcaactcacagagttgaactttcctttcgagagagaagctttgaaacactctttctccagaatctgcaagtggacatttggagggctttgaggcctgtggtggaaaaggaattatcttcccgtaaaagctagatagaagcattgtcagaaacttctttgtgatgattgcattcaactcacagagttgaaggttccttttcaaagagcagtttccaatcactctttctgtggaatctgcaagtggatatttggacctattttgaagatttcgttggaaacgggagaatcttcacaggaaagctaaacagaagcattctcagaaacttctctgtgatgtttgtgttcaactcccagagtttcacattgcttttcatagagtagttctgaaacatgcttttcgtagtgtctacaagtggacatttggagcgctttcaggcctgtggtggaaaacgaattatggtcacataaaaactggagagaagccttctcagaaacttctctgtgatgattgcattcaactcacagagttgaaccctcctatggatagagcagtgttgaaactctctttttgtggaatctgcaagtggatacgtggacctctccgaagatgtctttggaaacgggaatatcttcacataaaaactaaacagaagcattctcagaaacttcttggtgatgtttgcattcaaatcccagagttgaaccttcctttgatagttcaggtttgaaacactctttttgtaggatctgcaagtggatatttggaccactctgtggccttcgttcgaaacgggtatatcttcgcataaaatctagacagaagcattctcagaaaatactttgtgatgattgagttgaactcacagagctgaacattcctttggatggagcaggtttgagacacactttttgtagaatctacaagtggatatttggacctctctgaggatttcgttggaaacgggataactgcacctaactaaacggaagcattctcagaaactgctttgtgatgattgcattcacctcacagagttgaacattcctattgatagagcagtttggaaacactcttgttgtggaatgtgcaagtggagatttggagcgctttgaggcctgtggtagtaaagggaatagcttcatagaaaaactagacagatgcattctcaggaactttttggtgatgtttgtattcaactcccagagttgaactttcctttggaaagagcagctatgaaacactgtttttctagaatctgcaagtggacgtttggagggctttgtggtttgtggtggaaaaggaaatatcttcacctaaatactagatagaagcatcctcagaagcttctctgtgatgactgcattcaactcacggagttgaacactccttttgagagcgcagttttgaaactctctttctgtggcatctgcaaggggacatgtagacctctttgaagatttcgttggaaacggaatcatcttcacataaaaactacacagaagcaatctcagaatcttctttgtgatgtttgcattcaaatccccgagttgaactttcctttcaaagttcacgtttgaaacactctttttgcaggatctacaagtggatatttggaccactctgtgtccttcgatcgaaacgggtatatcttcacatgacatctagacagaagctttctcagaaaattctttgggatgattgagtggaactcacagagctgaacattccttgcgatgtagaagtttagaaacacactttctgcagaatctgcaagtgcatatttggacctctctgaggaattcgttggaaacgggataatttcagctgactaaacagaagcattctcagaaccttcttcgtgatgtctgcattcaactcacagtgtggaacctttctttgatagttcaggtttgaaacactctttttgtagaaactgcaaggggataattgcacttctttgaggcctaccgtagtaaaggaaataacttcctatagaaagaagacagaagcattctcagaaccctcttcgtgatgtttgcattcaactcacagtgctgaacctttctttgatagttcagctttgaaacactcttcttgtagaaactgcaagtggatatttggtcctctctgaggatttcgttggaaacgggataaaccgcacagaactaaacagaagaattctcagagccctcttcgtgatgtttgcattcaactcacagtgctgaacctttctttgatagtgcagctttgaaacactctttttgtagaaactgcaagtggatgtttggtcctctctgaggatttcgttggaaacgggataaaccgcacagaactaaaacagaagcattgtcagaaacttctttgtgatgattgcattcaactcacagagttgaaggttccttttcaaacagcagtttccaatcactctttctgtggaatctgcaagtggatatttgggcctctctgaggatttcgttggaaacgggataaaacgcacagaactaaaacagaagcattctcagaaacttctctgtgatgtttgtgttcaactcccagagtttcacgttgcttttcatagagtagttctgaaacatgcttttcgtagtgtctgcaagtggacatttggagcgctttcaggcctgtggtggaaaacgaattatggtcacataaaaactggagagaagccttctcagaaacttctctgtgatgattgcattcaactcacagagttgaaccctcctatggatagagcagtgttgaaactctctttttgtggaatctgcaagtggatatgtggacctctccgaagatgtctttggaaacgggaatatcttcacataaaaactaaacagaagcattctcagaaacttcttggtgatgtttgcattcaaatcccagagttgaaccttcctttgatagttcaggtttgaaacactctttctgtaggatctgcaagtggctatttggaccactctgtggccttcgttcgaaacgggtatatcttcgcataaaatctagacagaagcattctcagaaaatactttgtgatgattgagtttaaatcacagagctgaccattcctttggatggagcaggtttgagacacactttttgtagaatctacaagtggatatttggacctctctgaggatttcgttggaaacgggataactgcacctaactaaacggaagcattctcagaaactgctttgtgatgattgcattcacctcacagagttgaacattcctattgatagagcagtttggaaacactcttgttgtggaatgtgcaagtggagatttggagcgctttgaggcctatggtagtaaagggaatagcttcatagaaaaactagacagatgcattctcaggaactttttggtgatgtttgtattcaactcccagagttgaactttcctttggaaagagcagctatgaaacactctttttctagaatctgcaagtggacgtttggagggctttgtggtttgtggtggaaaaggaaatatcttcacctaaatactagatagaagcattctcagaagcttctctgtgatgactgcattcaactcacggagttgaacactccttttgagagcgcagttttgaaactctctttctgtggcatctgcaaggggacatgtagacctctttgaagatttcgttggaaacggaatcatcttcacataaaaactatacagaagcagtctcagaatcttctttgtgatgtttgcattcaaatcccagagttgaactttcctttcaaagttcacgtttgaaacactctttttgcaggatctacaagtggatatttggaccactctgtgtccttcgttcgaaacgggtatatcttcacacgacatctagacagaagctttctcagaaaattctttgggatgattgagtggaactcacagagctgaacattccttgcgatgtagcagtttagaaacacactttctgcagaatctgcaagtgcatatttggacctctctgaggaattcgttggaaacgggataatttcagctgactaaacagaagcattctcagaaccttcttcgtgatgtctgcattcaactcacagtgtggaacctttctttgatagttcaggtttgaaacactctttttgtagaaactgcaaggggataattgcacttctttgaggcctaccgtagtaaaggaaataacttcctatagaaagaagacagaagcattctcagaaccctcttcgtgatgtttgcattcaactcacagtgctgaacctttctttgatagttcagctttgaaacactcttcttgtagaaactgcaagtggatatttggtcctctctgaggatttcgttggaaacgggataaaccgcacagaactaaacagaagaattctcagagccctcttcgtgatgtttgcattcaactcacagtgctgaacctttctttgatagtgcagctttgaaacactctttttgtagaaactgcaagtggatgtttggtcctctctgaggatttcgttggaaacgggataaaccgcacagaactaaaacagaagcattgtcagaaacttctttgtgatgattgcattcaactcacagagttgaaggttccttttcaaacagcagtttccaatcactctttctgtggaatctgcaagtggatatttgggcctctctgaggatttcgttggaaacgggataaaacgcacagaactaaaacagaagcattctcagaaacttctctgtgatgtttgtgttcaactcccagagtttcacgttgcttttcatagagtagttctgaaacatgcttttcgtagtgtctgcaagtggacatttggagcgctttcaggcctgtggtggaaaacgaattatggtcacataaaaactggagagaagccttctcagaaacttctctgtgatgattgcattcaactcacagagttgaaccctcctatggatagagcagtgttgaaactctctttttgtggaatctgcaagtggatatgtggacctctccgaagatgtctttggaaacgggaatatcttcacataaaaactaaacagaagcattctcagaaacttcttggtgatgtttgcattcaaatcccagagttgaaccttcctttgatagttcaggtttgaaacactctttctgtaggatctgcaagtggctatttggaccactctgtggccttcgttcgaaacgggtatatcttcgcataaaatctagacagaagcattctcagaaaatactttgtgatgattgagtttaaatcacagagctgaccattcctttggatggagcaggtttgagacacactttttgtagaatctacaagtggatatttggacctctctgaggatttcgttggaaacgggataactgcacctaactaaacggaagcattctcagaaactgctttgtgatgattgcattcacctcacagagttgaacattcctattgatagagcagtttggaaacactcttgttgtggaatgtgcaagtggagatttggagcgctttgaggcctgtggtagtaaagggaatagcttcatagaaaaactagacagatgcattctcaggaactttttggtgatgtttgtattcaactcccagagttgaactttcctttggaaagagcagctatgaaacactctttttctagaatctgcaagtggacgtttggagggctttgtggtttgtggtggaaaaggaaatatcttcacctaaatactagatagaagcattctcagaagcttctctgtgatgactgcattcaactcacggagttgaacactccttttgagagcgcagttttgaaactctctttctgtggcatctgcaaggggacatgtagacctctttgaagatttcgttggaaacggaatcatcttcacataaaaactatacagaagcagtctcagaatcttctttgtgatgtttgcattcaaatcccagagttgaactttcctttcaaagttcacgtttgaaacactctttttgcaggatctacaagtggatatttggaccactctgtgtccttcgttcgaaacgggtatatcttcacacgacatctagacagaagctttctcagaaaattctttgggatgattgagtggaactcacagagctgaacattccttgtgatgtagcagtttagaaacacactttctgcagaatctgcaagtgcatatttggacctctctgaggaattcgttggaaacgggataatttcagctgactaaacagaagcattctcagaaccttcttcgtgatgtctgcattcaactcacagtgtggaacctttctttgatagttcaggtttgaaacactctttttgtagaaactgcaaggggataattgcacttctttgaggcctaccgtagtaaaggaaataacttcctatagaaagaagacagaagcattctcagaaccctcttcgtgatgtttgcattcaactcacagtgctgaacctttctttgatagttcagctttgaaacactcttcttgtagaaactgcaagtggatatttggtcctctctgaggatttcgttggaaacgggataaaccgcacagaactaaacagaagcattctcagaaccttcttcgtgatgtttgcattcaactcacagtgttgaacctttctttgatagttcaggtttgaaacggtctttctgtagaaactgcaagtagatatttggacctctctgaggatttcgttggaaacgggataaaccgcacagaactaaaacagaagcattcacagaaaactcttggtgacgactgagtttaactcacagagctgaacattcctttggatggagcagtttcgaaacacactatttgtagaatgtgcaagtggatatttgggcctctctgaggatttcgttggaaacgggataaaccgcacagaactaaacagaagcattctcagaaactactttgtgatgattgcattcaagtcacagagttgaacattccctttgacagagcagtttggaaactctctttgtgtagaatctgcaagtggagatatggaccgctttgaggcctatggtagtaaaggaaatagcttcatataaaagctagacagtagcattctcagaaacttctttgtgatgcttgcattcaactcacagagttgaactttcctttcgagagagaagctttgaaacactctttttccagaatctgcaagtggacatttggagggctttgaggcctgtggtggaaaaggaattaacttcccgtaaaagctagatagaagcattgtcagaaacttctttgtgatgattgcattcaactcacagagatgaaggttcctttacaaacagcagtttccaaacactctttctgtggaatctgcaagtggatatttggacctctttgaagatttcgttggaaacgggagaatcttcacagaaaagctaaacagaagcattctcagaaacttctctgtgatgtttgtgttcaactcccagagtttcacattgcttttcatagagtagttctgaaacatgcttttcgtagtgtctgcaagtggacatttggagcgctttcaggcctgtggtggaaaacgaattatggtcccataaaaactggagagaagccttctcagaaacttctctgtgatgattgcattcaactcacagatttgaaccctcctatggatagagcattgttgaaactctctttttgtggaatctgcaagtggatatgtggacctctccgaagatgtctttggaaacgggaatatcttcacataaaaactaaacagaagcattctcagaaacttcttggtgatgtttgcattcaaatcccagagttgaaccttcctgtgatagttcaggtttgaaacactctttttgtaggatctgcaagtggatatttggaccactctgtggccttcgttcgaaacgggtacatcttcacataaaatctagacagaagcattctcagaaaatactttgtgatgattgagtttaactcacagagctgaacattcctttggatggagcaggtttgagacacactttttgtagaatctacaagtggatatttggacctctctgaggatttcgttggaaacgcgataactgctcctaactaaacggaagcattctcagaaactgctttgtgatgattgcattcacctcacagagttgaacattcctattgatagagcagtttggaaacactcttgttgtggaatgtgcaagtggagatttggagcgctttgaggcctatggtagtaaagggaatagcttcatagaaaaactagacagatgcattctcaagaactttttggtgatgtttgtattcaactcccagagttgaactttcctttggaaagagcagctatgaaacactctttttctagaatctgcaagtggacgtttggagggctttgtggtttgtggtggaaaaggaaatatcttcacctaaatactagatagaagcattctcagtagcttctctgtgatgactgcattcaactcacggagttgaacactccttttgagagcgcagttttgaaactctctttctttgtcatctgcaaggggacatgtagacctctctgaagatttcgttggaaacggaatcatcttcacataaaaactatacagaagcagtctcagaatcttctttgtgatgtttgcattcaaatcccagagttgaactttcctttcaaagttcacgtttgaaacactctttttgcaggatctacaagtggatatttggaccactctgtgtccttcgttcgaaacgggtatatcttcacatgacatctagacagaagctttctcagaaaattctttgggatgattgagtggaactcacagagctgaacattccttgcgatgtagcagtttagaaacacactttctgcagaatctgcaagtgcatatttggacctctctgaggaattcgttggaaacgggataatttcagctgactaaacagaagcattctcagaaccttcttcgtgatgtctgcattcaactcacagtgtggaacctttctttgatagttcagctttgaaacactctttttgtagaaactgcaaggggataattgcacttctttgaggcctaccgtagtaaaggaaataacttcctatagaaagaagacagaagcattctcagaaccctcttcgagatgtttgcattcaactcacagtgctgaacctttctttgatagttcagctttgaaacattcttcttgtagaaactgcaagtggatatttggtcctctctgaggatttcgttggaaacgggataaaccgcacagaactaaacagaagcattctcagaaccttcttcgtgatgtttgcattcaactcacagggttgaacctttctttgatagttcaggttggaaacggtctttctgtagaaactgcaagtagatatttggacctctctgaggatttcgttggtaacgggataaaccgcacagaactaaaacagaagcattcacagaaaactcttggtgacgactgagtttaactcacagagctgaacattcctttggatggagcagtttcgaaacacactatttgtagaatgtgcaagtggatatttgggcctctctgaggatttcgttggaaacgggataaaacgcacagaactaaacagaagcattctcagaaactactttgtgatgattgcattcaagtcacagagttgaacattccctttgacagagcagtttggaaactctctttgtgtagaatctgcaagtggagatatggaccgctttgaggcctatggtagtaaaggaaatagcttcatataaaaccagaccgtaagcattctcagaaacttctttgtgatgcttgcattcaactcacagagttgaactttcctttcgagagagaagctttgaaacactctttttccagaatctgcaagtggacatttggagggctttgaggcctgtggtggaaaaggaattatcttcccgtaaaagctagatagaagcattgtcagaaacttctttgtgatgattgcattcaagtcacagagttgaaggttccttttcaaagagcagtttccaatcactctttctgtggaatctgcaagtggatatttggacctctttgaagatttcgttggaaacgggagaatcttcacagaaaagctaaacagaagcattctcagaaacttctctgtgatgtttgtgttcaactcccagagtttcacgttgcttctcatagagtagttctgaaacatgcttttcgtagtgtctgcaagtggacatttggagcgctttcaggcctgtggtggaaaacgaattatggtcacataaaaactggagagaagccttctcagaaacttctctgtgatgattgcattcaactcacagagttgaaccctctatggatagagcagtgttgaaactctctttttgtggaatctgcaagtggatatgtggacctctccgaagatgtctttggaaacgggaatatcttcacataaaaactaaacagaagcattctcagaaacttcttggtgatgtttgcattcaaatcccagagttgaaccttcctttgatagttcaggtttgaaacactctttttgtaggatctggaagtggctatttggaccactctgtggccttcgttcgaaacgggtatatcttcgcataaaatctagacagaagcattctcagaaaatactttgtgacgattgagtttaaatcacagagctgaacattcctttggatggagcaggtttgagacacactttttgtagaatctacaagtggatatttggacctctctgaggatttcgttggaaacgggataactgcacctaactaaacggaagcattctcagaaactgctttgtgatgattgcattcacctcacagagttgaacattcctattgatagagcagtttggaaacactcttgttgtggaatgtgcaagtggagatttggagcgctttgaggcctatggtagtaaagggaatagcttcatagaaaaactagacagatgcattctcaggaactttttggtgatgtttgtattcaactcccagagttgaactttcctttggaaagagcagctatgaaacactctttttctagaatctgcaagtggacgtttggagggctttgtggtttgtggtggaaaaggaaatatcttcacctaaatactagatagaagcattctcagaagcttctctgtgatgactgcattcaactcacggagttgaacactccttttgagagcgcagttttgaaactctctttctgtggcatctgcaaggggacatgtagacctctttgaagatttcgttggaaacggaatcatcttcacataaaaactatacagaagcagtctcagaatcttctttgtgatgtttgcattcaaatcccagagttgaactttcctttcaaagttcacgtttgaaacactctttttgcaggatctacaagtggatatttggaccactctgtgtccttcgttcgaaacgggtatatcttcacacgacatctagacagaagctttctcagaaaattctttgggatgattgagtggaactcacagagctgaacattccttgcgatgtagcagtttagaaacacactttctgcagaatctgcaagtgcatatttggacctctctgaggaattcgttggaaacgggataatttcagctgactaaacagaagcattctcagaaccttcttcgtgatgtctgcattcaactcacagtgtggaacctttctttgatagttcaggtttgaaacactctttttgtagaaactgcaaggggataattgcacttctttgaggcctaccgtagtaaaggaaataacttcctatagaaagaagacagaagcattctcagaaccctcttcgtgatgtttgcattcaactcacagtgctgaacctttctttgatagttcagctttgaaacactcttcttgtagaaactgcaagtggatatttggtcctctctgaggatttcgttggaaacgggataaaccgcacagaactaaacagaagaattctcagagccctcttcgtgatgtttgcattcaactcacagtgctgaacctttctttgatagtgcagctttgaaacactctttttgtagaaactgcaagtggatgtttggtcctccctgaggatttcgttggaaacgggataaaccgcacagaactaaaacagaagcattgtcagaaacttctttgtgatgattgcattcaactcacagagttgaaggttccttttcaaacagcagtttccaatcactctttctgtggaatctgcaagtggatatttgggcctctctgaggatttcgttggaaacgggataaaacgcacagaactaaaacagaagcattctcagaaacttctctgtgatgtttgtgttcaactcccagagtttcacgttgcttttcatagagtagttctgaaacatgcttttcgtagtgtctgcaagtggacatttggagcgctttcaggcctgtggtggaaaacgaattatggtcacataaaaactggagagaagccttctcagaaacttctctgtgatgattgcattcaactcacagagttgaaccctcctatggatagagcagtgttgaaactctctttttgtggaatctgcaagtggatatgtggacctctccgaagatgtctttggaaacgggaatatcttcacataaaaactaaacagaagcattctcagaaacttcttggtgatgtttgcattcaaatcccagagttgaaccttcctttgatagttcaggtttgaaacactctttctgtaggatctgcaagtggctatttggaccactctgtggccttcgttcgaaacgggtatatcttcgcataaaatctagacagaagcattctcagaaaatactttgtgatgattgagtttaaatcacagagctgaccattcctttggatggagcaggtttgagacacactttttgtagaatctacaagtggatatttggacctctctgaggatttcgttggaaacgggataactgcacctaactaaacggaagcattctcagaaactgctttgtgatggttgcattcacctcacagagttgaacattcctattgatagagcagtttggaaacactcttgttgtggaatgtgcaagtggagatttggagcgctttgaggcctatggtagtaaagggaatagcttcatagaaaaactagacagatgcattctcaggaaccttttggtgatgtttgtattcaactcccagagttgaactttcctttggaaagagcagctatgaaacactctttttctagaatctgcaagtggacgtttggagggctttgtggtttgtggtggaaaaggaaatatcttcacctaaatactagatagaagcattctcagaagcttctctgtgatgactgcattcaactcacggagttgaacactccttttgagagcgcagttttgaaactctctttctgtggcatctgcaaggggacatgtagacctctttgaagatttcgttggaaacggaatcatcttcacataaaaactatacagaagcagtctcagaatcttctttgtgatgtttgcattcaaatcccagagttgaactttcctttcaaagttcacgtttgaaacactctttttgcaggatctacaagtggatatttggaccactctgtgtccttcgttcgaaacgggtatatcttcacacgacatctagacagaagctttctcagaaaattctttgggatgattgagtggaactcacagagctgaacattccttgcgatgtagcagtttagaaacacactttctgcagaatctgcaagtgcatatttggacctctctgaggaattcgttggaaacgggataatttcagctgactaaacagaagcattctcagaaccttcttcgtgatgtctgcattcaactcacagtgtggaacctttctttgatagttcaggtttgaaacactctttttgtagaaactgcaaggggataattgcacttctttgaggcctaccgtagtaaaggaaataacttcctatagaaagaagacagaagcattctcagaaccctcttcgtgatgtttgcattcaactcacagtgctgaacctttctttgatagttcagctttgaaacactcttcttgtagaaactgcaagtggatatttggtcctctctgaggatttcgttggaaacgggataaaccgcacagaactaaacagaagcattctcagaaccttcttcgtgatgtttgcattcaactcacagtgttgaacctttctttgatagttcaggtttgaaacggtctttctgtagaaactgcaagtagatatttggacctctctgaggatttcgttggaaacgggataaaccgcacagaactaaaacagaagcattcacagaaaactcttggtgacgactgagtttaactcacagagctgaacattcctttggatggagcagtttcgaaacacactatttgtagaatgtgcaagtggatatttgggcctctctgaggatttcgttggaaacgggataaaccgcacagaactaaacagaagcattctcagaaactactttgtgatgattgcattcaagtcacagagttgaacattccctttgacagagcagtttggaaactctctttgtgtagaatctgcaagtggagatatggaccgctttgaggcctatggtagtaaaggaaatagcttcatataaaagctagacagtagcattctcagaaacttctttgtgatgcttgcattcaactcacagagttgaactttcctttcgagagagaagctttgaaacactctttttccagaatctgcaagtggacatttggagggctttgaggcctgtggtggaaaaggaattatcttcccgtaaaagctagatagaagcattgtcagaaacttctttgtgatgattgcattcaactcacagagttgaaggttccttttcaaagagcagtttccaatcactctttctgtggaatctgcaagtggatatttggacctattttgaagatttcgttggaaacgggagaatcttcacaggaaagctaaacagaagcattctcagaaacttctctgtgatgtttgtgttcaactcccagagtttcacattgcttttcatagagtagttctgaaacatgcttttcgtagtgtctacaagtggacatttggagcgctttcaggcctgtggtggaaaacgaattatggtcacataaaaactggagagaagccttctcagaaacttctctgtgatgattgcattcaactcacagagttgaaccctcctatggatagagcagtgttgaaactctctttttgtggaatctgcaagtggatatgtggacctctccgaagatgtctttggaaacgggaatatcttcacataaaaactaaacagaagcattctcagaaacttcttggtgatgtttgcattcaaatcccagagttgaaccttcctttgatagttcaggtttgaaacactctttttgtaggatctgcaagtggatatttggaccactctgtggccttcgttcgaaacgggtatatcttcgcataaaatctagacagaagcattctcagaaaatactttgtgatgattgagtttaactcacagagctgaacattcctttggatggagcaggtttgagacacaccttttgtagaatctacaagtggatatttggacctctctgaggatttcgttggaaacgggataactgcacctaactaaacggaagcattctcagaaactgctttgtgatgactgcattcacctcacagagttgaacattcctattgatagagcagtttggaaacactcttgttgtggaatgtgcaagtggagatttggagcgctttgaggcctatggtagtaaagggaatagcttcatagaaaaactagacagatgcattctcaggaactttttggtgatgtttgtattcaactcccagagttgaactttcctttggaaagagcagctatgaaacactgtttttctagaatctgcaagtggacgtttggagggctttgtggtttgtggtggaaaaggaaatatcttcacctaaatactagatagaagcatcctcagaagcttctctgtgatgactgcattcaactcacggagttgaacactccttttgagagcgcagttttgaaactctctttctgtggcatctgcaaggggacatgtagacctctttgaagatttcgttggaaacggaatcatcttcacataaaaactatacagaagcagtctcagaatcttctttgtgatgtttgcattcaaatccccgagttgaactttcctttcaaagttcacgtttgaaacactctttttgcaggatctacaagtggatatttggaccactctgtgtccttcgttcgaaacgggtatatcttcacatgacatctagacagaagctttctcagaaaattctttgggatgattgagttgaactcacagagctgagcattccttgcgatgtagcagtttagaaacacactttctgcagaatctgcaagtgcatatttggacctctgtgaggaattcgttggaaacgggataatttcagctgactaaacagaagcattctcagaaccttcttcgtgatgtctgcattcaactcacagtgtggaaacctttctttgatagttcaggtttgaaacactctttttgtagaaactgcaaggggataattgcactctttgaggagtaccgtagtaaaggaaataacttcctctaaaaagaagacagaagaattctcagagccctcttcgtgatgtttgcattcaactcacagtgctgaacctttctttgatagtgcagctttgaaacactctttttgtagaaactgcaagtggatgtttggtcctctctgaggatttcgttggaaacgggataaaccgcacagaactaaaacagaagcattgtcagaaacttctttgtgatgattgcattcaactcacagagttgaaggttccttttcaaacagcagtttccaatcactctttctgtggaatctgcaagtggatatttgggcctctctgaggatttcgttggaaacgggataaaacgcacagaactaaaacagaagcattctcagaaacttctctgtgatgtttgtgttcaactcccagagtttcacgttgcttttcatagagtagttctgaaacatgcttttcgtagtgtctgcaagtggacatttggagcgctttcaggcctgtggtggaaaacgaattatggtcacataaaaactggagagaagccttctcagaaacttctctgtgatgattgcattcaactcacagagttgaaccctcctatggatagagcagtgttgaaactctctttttgtggaatctgcaagtggatatgtggacctctccgaagatgtctttggaaacgggaatatcttcacataaaaactaaacagaagcattctcagaaacttcttggtgatgtttgcattcaaatcccagagttgaaccttcctttgatagttcaggtttgaaacactctttctgtaggatctgcaagtggctatttggaccactctgtggccttcgttcgaaacgggtatatcttcgcataaaatctagacagaagcattctcagaaaatactttgtgatgattgagtttaaatcacagagctgaccattcctttggatggagcaggtttgagacacactttttgtagaatctacaagtggatatttggacctctctgaggatttcgttggaaacgggataactgcacctaactaaacggaagcattctcagaaactgctttgtgatgattgcattcacctcacagagttgaacattcctattgatagagcagtttggaaacactcttgttgtggaatgtgcaagtggagatttggagcgctttgaggcctgtggtagtaaagggaatagcttcatagaaaaactagacagatgcattctcaggaactttttggtgatgtttgtattcaactcccagagttgaactttcctttggaaagagcagctatgaaacactctttttctagaatctgcaagtggacgtttggagggctttgtggtttgtggtggaaaaggaaatatcttcacctaaatactagatagaagcattctcagaagcttctctgtgatgactgcattcaactcacggagttgaacactccttttgagagcgcagttttgaaactctctttctgtggcatctgcaaggggacatgtagacctctttgaagatttcgttggaaacggaatcatcttcacataaaaactatacagaagcagtctcagaatcttctttgtgatgtttgcattcaaatcccagagttgaactttcctttcaaagttcacgtttgaaacactctttttgcaggatctacaagtggatatttggaccactctgtgtccttcgttcgaaacgggtatatcttcacacgacatctagacagaagctttctcagaaaattctttgggatgattgagtggaactcacagagctgaacattccttgcgatggagcagtttagaaacacactttctgcagaatctgcaagtgcatatttggacctctctgaggaattcgttggaaacgggataatttcagctgactaaacagaagcattctcagaaccttcttcgtgatgtctgcattcaactcacagtgtggaacctttctttgatagttcaggtttgaaacactctttttgtagaaactgcaaggggataattgcacttctttgaggcctaccgtagtaaaggaaataacttcctatagaaagaagacagaagcattctcagaaccctcttcgtgatgtttgcattcaactcacagtgctgaacctttctttgatagttcagctttgaaacactcttcttgtagaaactgcaagtggatatttggtcctctctgaggatttcgttggaaacgggataaaccgcacagaactaaacagaagcattctcagagccctcttcgtgatgtttgcattcaactcacagtgctgaacctttctttgatagtgcagctttgaaacactctttttgtagaaactgcaagtggatgtttggtcctctctgaggatttcgttggaaacgggataaaccgcacagaactaaaacagaagcattgtcagaaacttctttgtgatgattgcattcaactcacagagttgaaggttccttttcaaacagcagtttccaatcactctttctgtggaatctgcaagtggatatttgggcctctctgaggatttcgttggaaacgggataaaacgcacagaactaaaacagaagcattctcagaaacttctctgtgatgtttgtgttcaactcccagagtttcacgttgcttttcatagagtagttctgaaacatgcttttcgtagtgtctgcaagtggacatttggagcgctttcaggcctgtggtggaaaacgaattatggtcacataaaaactggagagaagccttctcagaaacttctctgtgatgattgcattcaactcacagagttgaaccctcctatggatagagcagtgttgaaactctctttttgtggaatctgcaagtggatatgtggacctctccgaagatgtctttggaaacgggaatatcttcacataaaaactaaacagaagcattctcagaaacttcttggtgatgtttgcattcaaatcccagagttgaaccttcctttgatagttcaggtttgaaacactctttctgtaggatctgcaagtggctatttggaccactctgtggccttcgttcgaaacgggtatatcttcgcataaaatctagacagaagcattctcagaaaatactttgtgatgattgagtttaaatcacagagctgaccattcctttggatggagcaggtttgagacacactttttgtagaatctacaagtggatatttggacctctctgaggatttcgttggaaacgggataactgcacctaactaaacggaagcattctcagaaactgctttgtgatgattgcattcacctcacagagttgaacattcctattgatagagcagtttggaaacactcttgttgtggaatgtgcaagtggagatttggagcgctttgaggcctatggtagtaaagggaatagcttcatagaaaaactagacagatgcattctcaggaactttttggtgatgtttgtattcaactcccagagttgaactttcctttggaaagagcagctatgaaacactctttttctagaatctgcaagtggacgtttggagggctttgtggtttgtggtggaaaaggaaatatcttcacctaaatactagatagaagcattctcagaagcttctctgtgatgactgcattcaactcacggagttgaacactccttttgagagcgcagttttgaaactctctttctgtggcatctgcaaggggacatgtagacctctttgaagatttcgttggaaacggaatcatcttcacataaaaactatacagaagcagtctcagaatcttctttgtgatgtttgcattcaaatcccagagttgaactttcctttcaaagttcacgtttgaaacactctttttgcaggatctacaagtggatatttggaccactctgtgtccttcgttcgaaacgggtatatcttcacacgacatctagacagaagctttctcagaaaattctttgggatgattgagtggaactcacagagctgaacattccttgcgatgtagcagtttagaaacacactttctgcagaatctgcaagtgcatatttggacctctctgaggaattcgttggaaacgggataatttcagctgactaaacagaagcattctcagaaccttcttcgtgatgtctgcattcaactcacagtgtggaacctttctttgatagttcaggtttgaaacactctttttgtagaaactgcaaggggataattgcacttctttgaggcctaccgtagtaaaggaaataacttcctatagaaagaagacagaagcattctcagaaccctcttcgtgatgtttgcattcaactcacagtgctgaacctttctttgatagttcagctttgaaacactcttcttgtagaaactgcaagtggatatttggtcctctctgagcatttcgttggaaacgggataaaccgcacagaactaaacagaagaattctcagagccctcttcgtgatgtttgcattcaactcacagtgctgaacctttctttgatagtgcagctttgaaacactctttttgtagaaactgcaagtggatgtttggtcctctctgaggatttcgttggaaacgggataaaccgcacagaactaaaacagaagcattgtcagaaacttctttgtgatgattgcattcaactcacagagttgaaggttccttttcaaacagcagtttccaatcactctttctgtggaatctgcaagtggatatttgggcctctctgaggatttcgttggaaacgggataaaacgcacagaactaaaacagaagcattctcagaaacttctctgtgatgtttgtgttcaactcccagagtttcacgttgcttttcatagagtagttctgaaacatgcttttcgtagtgtctgcaagtggacatttggagcgctttcaggcctgtggtggaaaacgaattatggtcacataaaaactggagagaagccttctcagaaacttctctgtgatgattgcattcaactcacagagttgaaccctcctatggatagagcagtgttgaaactctctttttgtggaatctgcaagtggatatgtggacctctccgaagatgtctttggaaacgggaatatcttcacataaaaactaaacagaagcattctcagaaacttcttggtgatgtttgcattcaaatcccagagttgaaccttcctttgatagttcaggtttgaaacactctttctgtaggatctgcaagtggctatttggaccactctgtggccttcgttcgaaacgggtatatcttcgcataaaatctagacagaagcattctcagaaaatactttgtgatgattgagtttaaatcacagagctgaccattcctttggatggagcaggtttgagacacactttttgtagaatctacaagtggatatttggacctctctgaggatttcgttggaaacgggataactgcacctaactaaacggaagcattctcagaaactgctttgtgatgattgcattcacctcacagagttgaacattcctattgatagagcagtttggaaacactcttgttgtggaatgtgcaagtggagatttggagcgctttgaggcctgtggtagtaaagggaatagcttcatagaaaaactagacagatgcattctcaggaactttttggtgatgtttgtattcaactcccagagttgaactttcctttggaaagagcagctatgaaacactctttttctagaatctgcaagtggacgtttggagggctttgtggtttgtggtggaaaaggaaatatcttcacctaaatactagatagaagcattctcagaagcttctctgtgatgactgcattcaactcacggagttgaacactccttttgagagcgcagttttgaaactctctttctgtggcatctgcaaggggacatgtagacctctttgaagatttcgttggaaacggaatcatcttcacataaaaactatacagaagcagtctcagaatcttctttgtgatgtttgcattcaaatcccagagttgaactttcctttcaaagttcacgtttgaaacactctttttgcaggatctacaagtggatatttggaccactctgtgtccttcgttcgaaacgggtatatcttcacacgacatctagacagaagctttctcagaaaattctttgggatgattgagtggaactcacagagctgaacattccttgcgatgtagcagtttagaaacacactttctgcagaatctgcaagtgcatatttggacctctctgaggaattcgttggaaacgggataatttcagctgactaaacagaagcattctcagaaccttcttcgtgatgtctgcattcaactcacagtgtggaacctttctttgatagttcaggtttgaaacactctttttgtagaaactgcaaggggataattgcacttctttgaggcctaccgtagtaaaggaaataacttcctatagaaagaagacagaagcattctcagaaccctcttcgtgatgtttgcattcaactcacagtgctgaacctttctttgatagttcagctttgaaacactcttcttgtagaaactgcaagtggatatttggtcctctctgaggatttcgttggaaacgggataaaccgcacagaactaaacagaagaattctcagagccctcttcgtgatgtttgcattcaactcacagtgctgaacctttctttgatagtgcagctttgaaacactctttttgtagaaactgcaagtggatgtttggtcctctctgaggatttcgttggaaacgggataaaccgcacagaactaaaacagaagcattgtcagaaacttctttgtgatgattgcattcaactcacagagttgaaggttccttttcaaacagcagtttccaatcactctttctgtggaatctgcaagtggatatttgggcctctctgaggatttcgttggaaacgggataaaacgcacagaactaaaacagaagcattctcagaaacttctctgtgatgtttgtgttcaactcccagagtttcacgttgcttttcatagagtagttctgaaacatgcttttcgtagtgtctgcaagtggacatttggagcgctttcaggcctgtggtggaaaacgaattatggtcacataaaaactggagagaagccttctcagaaacttctctgtgatgattgcattcaactcacagagttgaaccctcctatggatagagcagtgttgaaactctctttttgtggaatctgcaagtggatatgtggacctctccgaagatgtctttggaaacgggaatatcttcacataaaaactaaacagaagcattctcagaaacttcttggtgatgtttgcattcaaatcccagagttgaaccttcctttgatagttcaggtttgaaacactctttttgtaggatctgcaagtggctatttggaccactctgtggccttcgttcgaaactggtatatcttcgcataaaatctagacagaagcattctcagaaaatactttgtgatgattgagtttaaatctcagagctgaacattcctttggatggagcaggtttgagacacactttttgtagaatctacaagtggatatttggacctctctgaggatttcgttggaaacgggataactgcacctaactaaacggaagcattctcagaaactgctttgtgatgattgcattcacctcacagagttgaacattcctattgatagagcagtttggaaacactcttgttgtggaatgtgcaagtggagatttggagcgctttgaggcctatggtagtaaagggaatagcttcatagaaaaactagacagatgcattctcaggaactttttggtgatgtttgtattcaactcccagcagttgaactttcctttggaaagagcagctatgaaacactctttttctagaatctggaagtggacgtttggagggctttgtggtttgtggtggaaaaggaaatatcttcacctaaatactagatagaagcattctcagaagcttctctgtgatgactgcattcaactcacggagttgaacactccttttgagagcgcagttttgaaactctctttctgtggcatctgcaaggggacatgtagacctctttgaagatttcgttggaaacggaatcatcttcacataaaaactatacagaagcagtctcagaatcttctttgtgatgtttgcattcaaatcccagagttgaactttcctttcaaagttcacgtttgaaacactctttttgcaggatctacaagtggatatttggaccactctgtgtccttcgttcgaaacgggtatatcttcacacgacatctagacagaagctttctcagaaaattctttgggatgattgagtggaactcacagagctgaacattccttgcgatgtagcagtttagaaacacactttctgcagaatctgcaagtgcatatttggacctctctgaggaattcgttggaaacgggataatttcagctgactaaacagaagcattctcagaaccttcttcgtgatgtctgcattcaactcacagtgtggaacctttctttgatagttcaggtttgaaacactctttttgtagaaactgcaaggggataattgcacttctttgaggcctaccgtagtaaaggaaataacttcctatagaaagaagacagaagcattctcagaaccctcttcgtgatgtttgcattcaactcacagtgctgaacctttctttgatagttcagctttgaaacactcttcttgtagaaactgcaagtggatatttggtcctctctgaggatttctttggaaacgggataaaccgcacagaactaaacagaagaattctcagagccctcttcgtgatgtttgcattcaactcacagtgctgaatctttctttgatagtgcagctttgaaacactctttttgtagaaactgcaagtggatgtttggtcctctctgaggatttcgttggaaacgggataaaccgcacagaactaaaacagaagcattgtcagaaacttctttgtgatgattgcattcaactcacagagttgaaggttccttttcaaacagcagtttccaatcactctttctgtggaatctgcaagtggatatttgggcctctctgaggatttcgttggaaacgggataaaacgcacagaactaaaacagaagcattctcagaaacttctctgtgatgtttgtgttcaactcccagagtttcacgttgcttttcatagagtagttctgaaacatgcttttcgtagtgtctgcaagtggacatttggagcgctttcaggcctgtggtggaaaacgaattatggtcacataaaaactggagagaagccttctcagaaacttctctgtgatgattgcattcaactcacagagttgaaccctcctatggatagagcagtgttgaaactctctttttgtggaatctgcaagtggatatgtggacctctccgaagatgtctttggaaacgggaatatcttcacataaaaactaaacagaagcattctcagaaacttcttggtgatgtttgcattcaaatcccagagttgaaccttcctttgatagttcaggtttgaaacactctttctgtaggatctgcaagtggctatttggaccactctgtggccttcgttcgaaacgggtatatcttcgcataaaatctagacagaagcattctcagaaaatactttgtgatgattgagtttaaatcacagagctgaccattcctttggatggagcaggtttgagacacactttttgtagaatctacaagtggatatttggacctctctgaggatttcgttggaaacgggataactgcacctaactaaacggaagcattctcagaaactgctttgtgatgattgcattcacctcacagagttgaacattcctattgatagagcagtttggaaacactcttgttgtggaatgtgcaagtggagatttggagcgctttgaggcctgtggtagtaaagggaatagcttcatagaaaaactagacagatgcattctcaggaactttttggtgatgtttgtattcaactcccagagttgaactttcctttggaaagagcagctatgaaacactctttttctagaatctgcaagtggacgtttggagggctttgtggtttgtggtggaaaaggaaatatcttcacctaaatactagatagaagcattctcagaagcttctctgtgatgactgcattcaactcacggagttgaacactccttttgagagcgcagttttgaaactctctttctgtggcatctgcaaggggacatgtagacctctttgaagatttcgttggaaacggaatcatcttcacataaaaactatacagaagcagtctcagaatcttctttgtgatgtttgcattcaaatcccaggagttgaactttcctttcaaagttcacgtttgaaacactctttttgcaggatctacaagtggatatttggaccactctgtgtccttcgttcgaaacgggtataacttcacacgacatctagacagaagctttctcagaaaattctttgggatgattgagtggaactcacagagctgaacattccttgcgatgtagcagtttagaaacacactttctgcagaatctgcaagtgcatatttggacctctctgaggaattcgttggaaacgggataatttcagctgactaaacagaagcattctcagaaccttcttcgtgatgtctgcattcaactcacagtgtggaacctttctttgatagttcaggtttgaaacactctttttgtagaaactgcaaggggataattgcacttctttgaggcctaccgtagtaaaggaaataacttcctatagaaagaagacagaagcattctcagaatcctcttcgtgatgtttgcattcaactcacagtgctgaacctttctttgatagttcagctttgaaacactcttcttgtagaaactgcaagtggatatttggtcctctctgaggatttcgttggaaacgggataaaccgcacagaactaaacagaagaattctcagagccctcttcgtgatgtttgcattcaactcacagtgctgaacttttctttgatagtgcagctttgaaacactctttttgtagaaactgcaagtggatgtttggtcctctctgaggatttcgttggaaacgggataaaccgcacagaactaaaacagaagcattgtcagaaacttctttgtgatgattgcattcaactcacagagttgaaggttccttttcaaacagcagtttccaatcactctttctgtggaatctgcaagtggatatttgggcctctctgaggatttcgttggaaacgggataaaacgcacagaactaaaacagaagcattctcagaaacttctctgtgatgtttgtgttcaactcccagagtttcacgttgcttttcatagagtagttctgaaacatgcttttcgtagtgtctgcaagtggacatttggagcgctttcaggcctgtggtggaaaacgaattatggtcacataaaaactggagagaagccttctcagaaacttctctgtgatgattgcattcaactcacagagttgaaccctcctatggatagagcagtgttgaaactctctttttgtggaatctgcaagtggatatgtggacctctccgaagatgtctttggaaacgggaatatcttcacataaaaactaaacagaagcattctcagaaacttcttggtgatgtttgcattcaaatcccagagttgaaccttcctttgatagttcaggtttgaaacactctttttgtaggatctgcaattggctatttggaccactctgtggccttcgttcgaaacgggtatatcttcgcataaaatctagacagaagcattctcagaaaatactttgtgatgattgagttaaaatcacagagctgaacattcctttggatggagcaggtttgagacacactttttgtagaatctacaagtggatatttggacctctctgaggatttcgttggaaacgggataactgcacctaactaaacggaagcattctcagaaactgctttgtgatgattgcattcacctcacagagttgaacattcctattgatagagcagtttggaaacactcttgttgtggaatgtgcaagtggagatttggagcgctttgaggtctatggtagtaaagggaatagcttcatagaaaaactagacagatgcattctcaggaactttttggtgatgtttgtattcaactcccagagttgaactttcctttggaaagagcagctatgaaacactctttttctagaatctgcaagtggacgtttggagggctttgtggtttgtggtggaaaaggaaatatcttcacctaaatactagatagaagcattctcagaagcttctctgtgatgactgcattcaactcacggagttgaacactccttttgagagcgcagttttgaaactctctttctgtggcatctgcaaggggacatgtagacctctttgaagatttcgttggaaacggaatcatcttcacataaaaactatacagaagcagtctcagaatcttctttgtgatgtttgcattcaaatcccagagttgaactttcctttcaaagttcacgtttgaaacactctttttgcaggatctacaagtggatatttggaccactctgtgtccttcgttcgaaacgggtatatcttcacacgacatctagacagaagctttctcagaaaattctttgggatgattgagtggaactcacagagctgaacattccttgcgatgtagcagtttagaaacacactttctgcagaatctgcaagtgcatatttggacctctctgaggaattcgttggaaacgggataatttcagctgactaaacagaagcattctcagaaccttcttcgtgatgtctgcattcaactcacagtgtggaacctttctttgatagttcaggtttgaaacactctttttgtagaaactgcaaggggataattgcacttctttgaggcctaccgtagtaaaggaaataacttcctatagaaagaagacagaagcattctcagaaccctcttcgtgatgtttgcattcaactcacagtgctgaacctttctttgatagttcagctttgaaacactcttcttgtagaaactgcaagtggatatttggtcctctctgaggatttcgttggaaacgggataaaccgcacagaactaaacagaagaattctcagagccctcttcgtgatgtttgcattcaactcacagtgctgaacctttctttgatagtgcagctttgaaacactctttttgtagaaactgcaagtggatgtttggtcctctctgaggatttcgttggaaacgggataaaccgcacagaactaaaacagaagcattgtcagaaacttctttgtgatgattgcattcaactcacagagttgaaggttccttttcaaacagcagtttccaatcactctttctgtggaatctgcaagtggatatttgggcctctctgaggatttcgttggaaacgggataaaacgcacagaactaaaacagaagcattctcagaaacttctctgtgatgtttgtgttcaactcccagagtttcacgttgcttttcatagagtagttctgaaacatgcttttcgtagtgtctgcaagtggacatttggagcgctttcaggcctgtggtggaaaacgaattatggtcacataaaaactggagagaagccttctcagaaacttctctgtgatgattgcattcaactcacagagttgaaccctcctatggatagagcagtgttgaaactctctttttgtggaatctgcaagtggatatgtggacctctccgaagatgtctttggaaacgggaatatcttcacataaaaactaaacagaagcattctcagaaacttcttggtgatgtttgcattcaaatcccagagttgaaccttcctttgatagttcaggtttgaaacactctttctgtaggatctgcaagtggctatttggaccactctgtggccttcgttcgaaacgggtatatcttcgcataaaatctagacagaagcattctcaggaaaatactttgtgatgattgagtttaaatcacagagctgaccattcctttggatggagcaggtttgagacacactttttgtagaatctacaagtggatatttggacctctctgaggatttcgttggaaacgggataactgcacctaactaaacggaagcattctcagaaactgctttgtgatgattgcattcacctcacagagttgaacattcctattgatagagcagtttggaaacactcttgttgtggaatgtgcaagtggagatttggagcgctttgaggcctatggtagtaaagggaatagcttcatagaaaaactagacagatgcattctcaggaactttttggtgatgtttgtattcaactcccagagttgaactttcctttggaaagagcagctatgaaacactctttttctagaatctgcaagtggacgtttggagggctttgtggtttgtggtggaaaaggaaatatcttcacctaaatactagatagaagcattctcagaagcttctctgtgatgactgcattcaactcacggagttgaacactccttttgagagcgcagttttgaaactctctttctgtggcatctgcaaggggacatgtagacctctttgaagatttcgttggaaacggaatcatcttcacataaaaactatacagaagcagtctcagaatcttctttgtgatgtttgcattcaaatcccagagttgaactttcctttcaaagttcacgtttgaaacactctttttgcaggatctacaagtggatatttggaccactctgtgtccttcgttcgaaacgggtatatcttcacacgacatctagacagaagctttctcagaaaattctttgggatgattgagtggaactcacagagctgaacattccttgcgatgtagcagtttagaaacacactttctgcagaatctgcaagtgcatatttggacctctctgaggaattcgttggaaacgggataatttcagctgactaaacagaagcattctcagaaccttcttcgtgatgtctgcattcaactcacagtgtggaacctttctttgatagttcaggtttgaaacactctttttgtagaaactgcaaggggataattgcacttctttgaggcctaccgtagtaaaggaaataacttcctatagaaagaagacagaagcattctcagaaccctcttcgtgatgtttgcattcaactcacagtgctgaacctttctttgatagttcagctttgaaacactcttcttgtagaaactgcaagtggatatttggtcctctctgaggatttcgttggaaacgggataaaccgcacagaactaaacagaagaattctcagagccctcttcgtggtgtttgcattcaactcacagtgctgaacctttctttgatagtgcagctttgaaacactctttttgtagaaactgcaagtggatatttggtcctctctgaggatttcgttggaaacgggataaaccgcacagaactaaaacagaagcattcacagaaaactcttggtgacgactgagtttaactcacagagctgaacattcctttggatggagcagtttcgaaacacactatttgtagaatctgcaagtggatatttgggcctctctgaggatttcgttggaaacgggataaaacgcatagaactaaaacagaagcattctcagaaactactttgtgatgattgcattcaagtcacagagttgaacattccctttgacagaacagtttggaaactctctttgtgtagaatctgcaagtggagatatggaccgctttgaggcctatggtagtaaaggaaatagcttcatataaaagctagacagtagcattctcagaaacttctttgtgatgcttgcattcaactcacagagttgaactttcctttcgagagagaagctttgaaacactctttttccagaatgtgcaagtggacatttggggagctttgaggcctgtggtggaaaaggaattatcttcccgtaaaagctagatagaagcattgtcagaaacttctttgtgatgattgcattcaactcacagagttgaaggttccttttcaaacagcagtttccaatcactctttctgtggaatctgcaagtggatatttcgacctctttgaagatttcgttggaaacgggagaatcttcacagaaaagctaaacagaagcattctcagaaacttctctgtgatgtttgtgttcaactcccagagtttcacgttgcttttcatagactagttctgaaacatgcttttcgtagtgtctgcaagtggacatttggagcgctttcaggcctgtggtggaaaacgaattatggtcacataaaaactggagagaagccttctcagaaacttctctgtgatgattgcattcaactcacagagttgaaccctcctatggatagagcagtgttgaaactctctttttgtggaatctgcaagtggatatgtggacctctccgaagatgtctttggaaacgggaatatcttcacataaaaactaaacagaagcattctcagaaacttcttggtgatgtttgcattcaaatcccagagttgaaccttcctttgatagttcaggtttgaaacactctttctgtaggatctgcaagtggctatttggaccactctgtggccttcgttcgaaacgggtatatcttcgcataaaatctagacagaagcattctcagaaaatactttgtgatgattgagtttaaatcacagagctgaccattcctttggatggagcaggtttgagacacactttttgtagaatctacaagtggatatttggacctctctgaggatttcgttggaaacgggataactgcacctaactaaacggaggcattctcagaaactgctttgtgatgattgcattcacctcacagagttgaacattcctattgatagagcagtttggaaacactcttgttgtggaatgtgcaagtggagatttggagcgctttgaggcctatggtagtaaagggaatagcttcatagaaaaactagacagatgcattctcaggaactttttggtgatgtttgtattcaactcccagagttgaactttcctttggaaagagcagctatgaaacactctttttctagaatctgcaagtggacgtttggagggctttgtggtttgtggtggaaaaggaaatatcttcacctaaatactagatagaagcattctcagaagctcctctgtgatgactgcattcaactcacggagttgaacactccttttgagagcgcagttttgaaactctctttctgtggcatctgcaaggggacatgtagacctctttgaagatttcgttggaaacggaatcatcttcacataaaaactatacagaagcagtctcagaatcttctttgtgatgtttgcattcaaatcccaggagttgaactttcctttcaaagttcacgtttgaaacactctttttgcaggatctacaagtggatatttggaccactctgtgtccttcgttcgaaacgggtataacttcacacgacatctagacagaagctttctcagaaaattctttgggatgattgagtggaactcacagagctgaacattccttgcgatgtagcagtttagaaacacactttctgcagaatctgcaagtgcatatttggacctctctgaggaattcgttggaaacgggataatttcagctgactaaacagaagcattctcagaaccttcttcgtgatgtctgcattcaactcacagtgtggaacctttctttgatagttcaggtttgaaacactctttttgtagaaactgcaaggggataattgcacttctttgaggcctaccgtagtaaaggaaataacttcctatagaaagaagacagaagcattctcagaaccctcttcgtgatgtttgcattcaactcacagtgctgaacctttctttgatagttcagctttgaaacactcttcttgtagaaactgcaagtggatatttggtcctctctgaggatttcgttggaaacgggataaaccgcacagaactaaacagaagaattctcagagccctcttcgtgatgtttgcattcaactcacagtgctgaacctttctttgatagtgcagctttgaaacactctttttgtagaaactgcaagtggatgtttggtcctctctgaggatttcgttggaaacgggataaaccgcacagaactaaaacagaagcattgtcagaaacttctttgtgatgattgcattcaactcacagagttgaaggttccttttcaaacagcagtttccaatcactctttctgtggaatctgcaagtggatatttgggcctctctgaggatttcgttggaaacgggataaaacgcacagaactaaaacagaagcattctcagaaacttctctgtgatgtttgtgttcaactcccagagtttcacgttgcttttcatagagtagttctgaaacatgcttttcgtagtgtctgcaagtggacatttggagcgctttcaggcctgtggtggaaaacgaattatggtcacataaaaactggagagaagccttctcagaaacttctctgtgatgattgcattcaactcacagagttgaaccctcctatggatagagcagtgttgaaactctctttttgtggaatctgcaagtggatatgtggacctctccgaagatgtctttggaaacgggaatatcttcacataaaaactaaacagaagcattctcagaaacttcttggtgatgtttgcattcaaatcccagagttgaaccttcctttgatagttcaggtttgaaacactctttctgtaggatctgcaagtggctatttggaccactctgtggccttcgttcgaaacgggtatatcttcgcataaaatctagacagaagcattctcagaaaatactttgtgatgattgagtttaaatcacagagctgaccattcctttggatggagcaggtttgagacacactttttgtagaatctacaagtggatatttggacctctctgaggatttcgttggaaacgggataactgcacctaactaaacggaagcattctcagaaactgctttgtgatgattgcattcacctcacagagttgaacattcctattgatagagcagtttggaaacactcttgttgtggaatgtgcaagtggagatttggagcgctttgaggcctatggtagtaaagggaatagcttcatagaaaaactagacagatgcattctcaggaactttttggtgatgtttgtattcaactcccagagttgaactttcctttggaaagagcagctatgaaacactctttttctagaatctgcaagtggacgtttggagggctttgtggtttgtggtggaaaaggaaatatcttcacctaaatactagatagaaagcattctcagaagcttctctgtgatgactgcattcaactcacggagttgaacactccttttgagagcgcagttttgaaactctctttctgtggcatctgcaaggggacatgtagacctctttgaagatttcgttggaaacggaatcatcttcacataaaaactatacagagcagtctcagaatcttctttgtgatgtttgcattcaaatcccagagttgaactttcctttcaaagttcacgtttgaaacactctttttgcaggatctacaagtggatatttggaccactcctgtgtccttcgttcgaaacgggtatatcttcacacgacatctagacagaagctttctcagaaaattctttgggatgattgagttgaactcacagagctgaacattccttgcgatggagcagtttagaaacacactttctgtagaatctgcaagtgcatatttggacctctctgaggaattcgttggaaacgcgaaaattcagctgactaaacagaagcattctcagaaccttcttcgtgatgtctgcattcaactcacagtgtggaacctttctttgatagttcaggtttgaaacactctttttgtagaaactgcaaggggataattgcacttctttgaggcctaccgtagtaaaggaaataacttcctatagaaagaagacagaagcattctcagaaccctcttcgtgatgtttgcattcaactcacagtgctgaacctttctttgatagttcagctttgaaacactcttcttgtagaaactgcaagtggatatttggtcctctctgaggatttcgttggaaacgggataaaccgcacagaactaaacagaagcattctcagaaccttcttcgtgatgtttgcattcaactcacagtgttgaacctttctttgatagttcaggtttgaaacggtctttctgtagaaactgcaagtagatatttggacctctctgaggatttcgttggaaacgggataacccgcacagaactaaaacagaagcattcacagaaaactcttggtgacgactgagtttaactcacagtagctgaacattcctttggatggagcagtttcgaaacacactatttgtagaatgtgcaagtggatatttgggcctctctgaggatttcgttggaaacgggataaaccgcacagaactaaacagaagcattctcagaaactactttgtgatgattgcattcaagtcacagagttgaacattccctttgacagagcagtttggaaactctctttgtgtagaatctgcaagtggagatatggaccgctttgaggcctatggtagtaaaggaaatagcttcatataaaagctagacagtagcattctcagaaacttctttgtgatgcttgcattcaactcacagagttgaactttcctttcgagagagaagctttgaaacactctttttccagaatctgcaagtggacatttggagggctttgaggcctgtggtggaaaaggaattatcttcccgtaaaagctagatagaagcattgtcagaaacttctttgtgatgattgcattcaactcacagagttgaaggttccttttcaaagagcagtttccaatcactctttgtgtggaatctgcaagtggacatttggacctattttgaagatttcgttggaaacgggagaatcttcacaggaaagctaaacagaagcattctcagaaacttctctgtgatgtttgtgttcaactcccagagtttcacattgcttttcatagagtagttctgaaacatgcttttcgtagtgtctacaagtggacatttggagcgctttcaggcctgtggtggaaaacgaattatggtcacataaaaactggagagaagccttctcagaaacttctctgtgatgattgcattcaactcacagagttgaaccctcctatggatagagcagtgttgaaactctctttttgtggaatctgcaagtggatatgtggacctctccgaagatgtctttggaaacgggaatatcttcacataaaaactaaacagaagcattctcagaaacttcttggtgatgtttgcattcaaatcccagagtcgaaccttcctttgatagttcaggtttgaaacactctttttgtaggatctgcaagtggatatttggaccactctgtggccttcgttcgaaacgggtatatcttcgcataaaatctagacagaagcattctcagaaaatactttgtgatgattgagtttaactcacagagctgaacattcctttggatggagcaggtttgagacacactttttgtagaatctacaagtggatatttggacctctctgaggatttcgttggaaacgggataactgcacctaactaaacggaagcattctcagaaactgctttgtgatgattgcattcaccacacagagttgaacattcctattgatagagcagtttggaaacactcttgttgtggaatgtgcaagtggagatttggagcgctttgaggcctatggtagtaaagggaatagcttcatagaaaaactagacagatgcattctcaggaactttttggtgatgtttgtattcaactcccagagttgaactttcctttggaaagagcagctatgaaacactgtttttctagaatctgcaagtggacgtttggagggctttgtggtttgtggtggaaaaggaaatatcttcacctaaatactagatagaagcatcctcagaagcttctctgtgatgactgcattcaactcacggagttgaacactccttttgagagcgcagttttgaaactctctttctgtggcatctgcaaggggacatgtagacctctttgaagatttcgttggaaacggaatcatcttcacataaaaactacacagaagcagtctcagaatcttctttgtgatgtttgcattcaaatccccgagttgaactttcctttcaaagttcacgtttgaaacactctttttgcaggatctacaagtggatatttggaccactctgtgtccttcgatcgaaacgggtatatcttcacatgacatctagacagaagctttctcagaaaattctttgggatgattgagtggaactcacagagctgaacattccttgcgatgtagcagtttagaaacacactttctgcagaatctgcaagtgcatatttggacctctctgaggaattcgttggaaacgggataatttcagctgactaaacagaagcattctcagaaccttcttcgtgatgtctgcattcaactcacagtgtggaacctttctttgatagttcaggtttgaaacactctttttgtagaaactgcaaggggataattgcacttctttgaggcctaccgtagtaaaggaaataacttcctatagaaagaagacagaagcattctcagaaccctcttcgtgatgtttgcattcaactcacagtgctgaacctttctttgatagttcagctttgaaacactcttcttgtagaaactgcaagtggatatttggtcctctctgaggatttcgttggaaacgggataaaccgcacagaactaaacagaagaattctcagagccctcttcgtgatgtttgcattcaactcacagtgctgaacctttctttgatagtgcagctttgaaacactctttttgtagaaactgcaagtggatgtttggtcctctctgaggatttcgttggaaacgggataaaccgcacagaactaaaacagaagcattgtcagaaacttctttgtgatgattgcattcaactcacagagttgaaggttccttttcaaacagcagtttccaatcactctttctgtggaatctgcaagtggatatttgggcctctctgaggatttcgttggaaacgggataaaacgcacagaactaaaacagaagcattctcagaaacttctctgtgatgtttgtgttcaactcccagagtttcacgttgcttttcatagagtagttctgaaacatgcttttcgtagtgtctgcaagtggacatttggagcgctttcaggcctgtggtggaaaacgaattatggtcacataaaaactggagagaagccttctcagaaacttctctgtgatgattgcattcaactcacagagttgaaccctcctatggatagagcagtgttgaaactctctttttgtggaatctgcaagtggatatgtggacctctccgaagatgtctttggaaacgggaatatcttcacataaaaactaaacagaagcattctcagaaacttcttggtgatgtttgcattcaaatcccagagttgaaccttcctttgatagttcaggtttgaaacactctttctgtaggatctgcaagtggctatttggaccactctgtggccttcgttcgaaacgggtatatcttcgcataaaatctagacagaagcattctcagaaaatactttgtgatgattgagtttaaatcacagagctgaacattcctttggatggagcaggtttgagacacactttttgtagaatctacaagtggatatttggacctctctgaggatttcgttggaaacgggataactgcacctaactaaacggaagcattctcagaaactgctttgtgatgattgcattcacctcacagagttgaacattcctattgatagagcagtttggaaacactcttgttgtggaatgtgcaagtggagatttggagcgctttgaggcctatggtagtaaagggaatagcttcatagaaaaactagacagatgcattctcaggaactttttggtgatgtttgtattcaactcccagatttgaactttcctttggaaagagcagctatgaaacactctttttctagaatctgcaagtggacgtttggagggcttcgtggtttgtggtggaaaaggaaatatcttcacctaaatactagatagaagcattctcagaagcttctctgtgatgactgcattcaactcacggagttgaacactccttttgagagcgcagttttgaaactctctttctgtggcatctgcaaggggacatgtagacctctttgaagatttcgttggaaacggaatcatcttcacataaaaactatacagaagcagtctcagaatcttctttgtgatgtttgcattcaaatcccagagttgaactttcctttcaaagttcacgtttgaaacactctttttgcaggatctacaagtggatatttggaccactctgtgtccttcgttcgaaacgggtatatcttcacacgacatctagacagaagctttctcagaaaattctttgggatgattgagtggaactcacagagctgaacattccttgcgatgtagcagtttagaaacacactttctgcagaatctgcaagtgcatatttggacctctctgaggaattcgttggaaacgggataatttcagctgactaaacagaagcattctcagaaccttcttcgtgatgtctgcattcaactcacagtgtggaacctttctttgatagttcaggtttgaaacactctttttgtagaaactgcaaggggataattgcacttctttgaggcctaccgtagtaaaggaaataacttcctatagaaagaagacagaagcattctcagaaccctcttcgtgatgtttgcattcaactcacagtgctgaacctttctttgatagttcagctttgaaacactcttcttgtagaaactgcaagtggatatttggtcctctctgaggatttcgttggaaacgggataaaccgcacagaactaaacagaagaattctcagagccctcttcgtgatgtttgcattcaactcacagtgctgaacctttctttgatagtgcagctttgaaacactctttttgtagaaactgcaagtggatgtttggtcctctctgaggatttcgttggaaacgggataaaccgcacagaactaaaacagaagcattgtcagaaacttctttgtgatgattgcattcaactcacagagttgaaggttccttttcaaacagcagtttccaatcactctttctgtggaatctgcaagtggatatttgggcctctctgaggatttcgttggaaacgggataaaacgcacagaactaaaacagaagcattctcagaaacttctctgtgatgtttgtgttcaactcccagagtttcacgttgcttttcatagagtagttctgaaacatgcttttcgtagtgtctgcaagtggacatttggagcgctttcaggcctgtggtggaaaacgaattatggtcacataaaaactggagagaagccttctcagaaacttctctgtgatgattgcattcaactcacagagttgaaccctcctatggatagagcagtgttgaaactctctttttgtggaatctgcaagtggatatgtggacctctccgaagatgtctttggaaacgggaatatcttcacataaaaactaaacagaagcattctcagaaacttcttggtgatgtttgcattcaaatcccagagttgaaccttcctttgatagttcaggtttgaaacactctttctgtaggatctgcaagtggctatttggaccactctgtggccttcgttcgaaacgggtatatcttcgcataaaatctagacagaagcattctcagaaaatactttgtgatgattgagtttaaatcacagagctgaccattcctttggatggagcaggtttgagacacactttttgtagaatctacaagtggatatttggacctctctgaggatttcgttggaaacgggataactgcacctaactaaacggaagcattctcagaaactgctttgtgatgattgcattcacctcacagagttgaacattcctattgatagagcagtttggaaacactcttgttgtggaatgtgcaagtggagatttggagcgctttgaggcctatggtagtaaagggaatagcttcatagaaaaactagacagatgcattctcaggaactttttggtgatgtttgtattcaactcccagagttgaactttcctttggaaagagcagctatgaaacactctttttctagaatctgcaagtggacgtttggagggctttgtggtttgtggtggaaaaggaaatatcttcacctaaatactagatagaagcattctcagaagcttctctgtgatgactgcattcaactcacggagttgaacactccttttgagagcgcagttttgaaactctctttctgtggcatctgcaaggggacatgtagacctctttgaagatttcgttggaaacggaatcatcttcacataaaaactatacagaagcagtctcagaatcttctttgtgatgtttgcattcaaatcccagagttgaactttcctttcaaagttcacgtttgaaacactctttttgcaggatctacaagtggatatttggaccactctgtgtccttcgttcgaaacgggtatatcttcacaggacatctagacagaagctttctcagaaaatcctttgggatgattgagtggaactcacagagctgaacattccttgcgatgtagcagtttagaaacacactttctgcagaatctgcaagtgcatatgtggacctctccgaggaattcgttggaaacgggataatttcagctgactaaacagaagcattctcagaaccttcttcgtgatgtctgcattcaactcacagtgtggaacctttctttgatagttcaggtttgaaacactctttttgtagaaactgcaaggggataattgcacttctttgaggcctaccgtagtaaaggaaataacttcctatagaaagaagacagaagcattctcagaaccctcttcgtgatgtttgcattcaactcacagtgctgaacctttctttgatagttcagctttgaaacactcttcttgtagaaactgcaagtggatatttggtcctctctgaggatttcgttggaaacgggataaaccgcacagaactaaacagaagaattctcagagccctcttcgtgatgtttgcattcaactcacagtgctgaacctttctttgatagtgcagctttgaaacactctttttgtagaaactgcaagtggatatttggtcctctctgaggatttcgttggaaacgggataagccgcacagaactaaaacagaagcattgtcagaaacttctttgtgatgattgcattcaactcacagagttgaaggttccttttcaaacagcagtttccaatcactctttctgtggaatctgcaagtggatatttgggcctctctgaggatttcgttggaaacgggataaaacgcacagaactaaaacagaagcattctcagaaacttctctgtgatgtttgtgttcaactcccagagtttcacgttgcttttcatagagtagttctgaaacatgcttttcgtagtgtctgcaagtggacatttggagcgctttcaggcctgtggtggaaaacgaattatggtcacataaaaactggagagaagccttctcagaaacttctctgtgatgattgcattcaactcactgagttgaaccctcctattggatagagcagtgttgaaactctctttttgtggaatctgcaagtggatatgtggacctctccgaagatgtctttggaaacgggaatatcttcacataaaaactaaacagaagcattctcagaaacttcttggtgatgtttgcattcaaatcccagagttgaaccttcctttgatagttcaggtttgaaacactctttttgtaggatctgcaagtagctatttggaccactctgtggccttcgttcgaaacgggtacatcttcgcataaaatctagacagaagcattctcagaaaatactttgtgatgattgagttgaactcacagagctgaacattcctttggatggagcaggtttgagacacactttttgtagaatctacaagtggatatttggacctctctgaggatttcgttggaaacgggataactgcacctaactaaacggaagcattctcagaaactcctttgtgatgattgcattcaccttacagagttgaacattcctattgatagagcagtttggaaacactgttgttgtggaatgtgcaagtggagatttggagcgctttgaggcctatggtagtaaagggaatagcttcatagaaaaactagacagatgcattctcaggaactttttggtgatgtttgtattcaactcccagagttgaactttcctttggaaagagcagctatgaaacactctttttctagaatctgcaagtggacgtttggagggctttgtggtttgtggtggaaaaggaaatatcttcacctaaatactagagagaagcattctcagaagcttctctgtgatgactgcattcaactcacggagttgaacactccttttgagagcgcagttttgaaactctctttctgtggcatccgcaaggggacatgtagacctctttgaagatttcgttggaaacggaatcatcttcacataaaaactatacagaagcagtctcagaatcttctttgtgatgtttgcattcaaatcccagagttgaactttcctttcaaagttcacgtttgaaacactctttttgcaggatctacaagtggatatttggaccactctgtgtccttcgttcgaaacgggtatatcttcacatgacatctagacagaagctttctcagaaaattctttgggatgattgagtggaactcacagagctgaacattccttgcgatgtagcagtttagaaacacactttctgcagaatctgcaagtgcatatttggacctctctgaggaattcgttggaaacgggataatttcagctgactaaacagaagcattcacagaaccttcttcgtgatgtctgcattcaactcacagtgtggaacctttctttgatagttcagctttgaaacactctttttgtagaaactgcaaggggataattgcacttctttgaggcctaccgtagtaaaggaaataacttcctatagaaagaagacagaagcattctcagaaccctcttcgtgatgtttgcattcaactcacagtgctgaacctttctttgatagttcagctttgaaacactcttcttgtagaaactgcaagtggatatttggtcctctctgaggatttcgttggaaacgggataaaccgcacagaactaaacagaagaattctcagagccctcttcgtgatgtttgcattcaactcacagtgctgaacctttctttgatagtgcagctttgaaacactctttttgtagaaactgcaagtggatgtttggtcctctctgaggatttcgttggaaacgggataaaccgcacagaactaaaacagaagcattgtcagaaacttctttgtgatgattgcattcaactcacagagttgaaggttccttttcaaacagcagtttccaatcactctttctgtggaatctgcaagtggatatttgggcctctctgaggatttcgttggaaacgggataaaacgcacagaactaaaacagaagcattctcagaaacttctctgtgatgtttgtgttcaactcccagagtttcacgttgcttttcatagagtagttctgaaacatgcttttcgtagtgtctgcaagtggacatttggagcgctttcaggcctgtggtggaaaacgaattatggtcacataaaaactggagagaagccttctcagaaacttctctgtgatgattgcattcaactcacagagttgaaccctcctatggatagagcagtgttgaaactctctttttgtggaatctgcaagtggatatgtggacctctccgaagatgtctttggaaacgggaatatcttcacataaaaactaaacagaagcattctcagaaacttcttggtgatgtttgcattcaaatcccagagttgaaccttcctttgatagttcaggtttgaaacactctttctgtaggatctgcaagtggctatttggaccactctgtggccttcgttcgaaacgggtatatcttcgcataaaatctagacagaagcattctcagaaaatactttgtgatgattgagtttaaatcacagagctgaccattcctttggatggagcaggtttgagacacactttttgtagaatctacaagtggatatttggacctctctgaggatttcgttggaaacgggataactgcacctaactaaacggaagcattctcagaaactgctttgtgatgattgcattcacctcacagagttgaacattcctattgatagagcagtttggaaacactcttgttgtggaatgtgcaagtggagatttggagcgctttgaggcctgtggtagtaaagggaatagcttcatagaaaaactagacagatgcattctcaggaactttttggtgatgtttgtattcaactcccagagttgaactttcctttggaaagagcagctatgaaacactctttttctagaatctgcaagtggacgtttggagggctttgtggtttgtggtggaaaaggaaatatcttcacctaaatactagacagagtcattctcagtaagcttctctgtgatgactgcattcaactcacggagttgaacactccttttgagagcgcagttttgaaactctctttctgtggcatctgcaaggggacatgtagacctctttgaagatttcgttggaaacggaatcatcttcacataaaaactatacagaagcagtctcagaatcttctttgtgatgtttgcattcaaatcccggagttgaacttccctttcaaagttcacgtttgaaacactctttttgcaggatctacaagtggatatttggaccactctgtgtccttcgttcgaaacgggtatatcttcacatgacatctagacagaagctttctcagaaaattctttgggatgattgagtggaactcacagagctgaacattccttgcgatgtagcagtttagaaacacactttctgcagaatctgcaagtgcatatttggacctctctgaggaattcgttggaaacgggataatttcagctgactaaacagaagcattctcagaaccttcttcgtgatgtctgcattcaactcacagtgtggaacctttctttgatagttcaggtttgaaacactctttttgtagaaactgcaaggggataatggcacttctttgaggcctaccgtagtaaaggaaataacttcctatagaaagaagacagaagcattctcagaaccctcttcgtgatgtttgcattcaactcacagtgctgaacctttctttgatagttcagctttgaaacactcttcttgtagaaactgcaagtggatatttggtcctctctgaggatttcgttggaaacgggataaaccgcacagaactaaacagaagcattctcagaaccttcttcgtgatgtttgcattcaactcacagtgttgaacctttctttgatagttcaggtttgaaacggtctttctgtagaaactgcaagtagatatttggacctctctgaggatttcgttggaaacgggataaaccgcacagaactaaaacagaagcattcacagaaaactcttggtgacgactgagtttaactcacagagctgaacattcctttggatggagcagtttcgaaacacactatttgtagaatgtgcaagtggatatttgggcctctctgaggatttcgttggaaacgggataaaccgcacagaactaaacagaagcattctcagtaaactactttgtgatgattgcattcaagtcacagagttgaacattccctttgacagagcagtttggaaactctctttgtgtagaatctgcaagtggagatatggaccgctttgaggcctatggtagtaaaggaaatagcttcatataaaagctagacagtagcattctcagaaacttctttgtgatgcttgcattcaactcacagagttgaactttcctttcgagagagaagctttgaaacactctttttccagaatgtgcaagtggacatttggggagctttgaggcctgtggaggaaaaggaattatcttcccgtaaaagctagatagaagcattgtcagaaacttctttgtgatgattgcattcaactcacagagttgaaggttccttttcaaacagcagtttccaatcactctttctgtggaatctgcaagtggatatttcgacctctttgaagatttcgttggaaacgggagaatcttcacagaaaagttcaacagaagcattctcagaaacttctctgtgatgtttgtgttcaactcccagagtttcacgttgcttttcatagagtagttctgaaacatgcttttcgtagtgtctgcaagtggacatttggagcgctttcaggcctgtggtggaaaacgaattatggtcacataaaaactggagagaagccttctcagaaacttctctgtgatgattgcattcaactcacagagttgaaccctcctatggatagagcagtgttgaaactctctttttgtggaatctgcaagtggatatgtggacctctccgaagatgtctttggaaacgggaatatcttcacataaaaactaaacagaagcattctcagaaacttcttggtgatgtttgcattcaaatcccagagttgaaccttcctttgatagttcaggtttgaaacactctttctgtaggatctgcaagtggctatttggaccactctgtggccttcgttcgaaacgggtatatcttcgcataaaatctagacagaagcattctcagaaaatactttgtgatgattgagtttaaatcacagagctgaccattcctttggatggagcaggtttgagacacactttttgtagaatctacaagtggatatttggacctctctgaggatttcgttggaaacgggataactgcacctaactaaacggaagcattctcagaaactgctttgtgatgattgcattcacctcacagagttgaacattcctattgatagagcagtttggaaacactcttgttgtggaatgtgcaagtggagatttggagcgctttgaggcctatggtagtaaagggaatagcttcatagaaaaactagacagatgcattctcaggaactttttggtgatgtttgtattcaactcccagagttgaactttcctttggaaagagcagctatgaaacactctttttctagaatctgcaagtggacgtttggagggctttgtggtttgtggtggaaaaggaaatatcttcacctaaatactagatagaagcattctcagaagcttctctgtgatgactgcattcaactcacggagttgaacactccttttgagagcgcagttttgaaactctctttctgtggcatctgcaaggggacatgtagacctctttgaagatttcgttggaaacggaatcatcttcacataaaaactatacagaagcagtctcagaatcttctttgtgatgtttgcattcaaatcccagagttgaactttcctttcaaagttcacgtttgaaacactctttttgcaggatctacaagtggatatttggaccactctgtgtccttcgttcgaaacgggtatatcttcacacgacatctagacagaagctttctcagaaaattctttgggatgattgagtggaactcacagagctgaacattccttgcgatgtagcagtttagaaacacactttctgcagaatctgcaagtgcatatttggacctctctgaggaattcgttggaaacgggataatttcagctgactaaacagaagcattctcagaaccttcttcgtgatgtctgcattcaactcacagtgtggaacctttctttgatagttcaggtttgaaacactctttttgtagaaactgcaaggggataattgcacttctttgaggcctaccgtagtaaaggaaataacttcctatagaaagaagacagaagcattctcagaaccctcttcgtgatgtttgcattcaactcacagtgctgaacctttctttgatagttcagctttgaaacactcttcttgtagaaactgcaagtggatatttggtcctctctgaggatttcgttggaaacgggataaaccgcacagaactaaacagaagaattctcagagccctcttcgtgatgtttgcattcaactcacagtgctgaacctttctttgatagtgcagctttgaaacactctttttgtagaaactgcaagtggatgtttggtcctctctgaggatttcgttggaaacgggataaaccgcacagaactaaaacagaagcattgtcagaaacttctttgtgatgattgcattcaactcacagagttgaaggttccttttcaaacagcagtttccaatcactctttctgtggaatctgcaagtggatatttgggcctctctgaggatttcgttggaaacgggataaaacgcacagaactaaaacagaagcattctcagaaacttctctgtgatgtttgtgttcaactcccagagtttcacgttgcttttcatagagtagttctgaaacatgcttttcgtagtgtctgcaagtggacatttggagcgctttcaggcctgtggtggaaaacgaattatggtcacataaaaactggagagaagccttctcagaaacttctctgtgatgattgcattcaactcacagagttgaaccctcctatggatagagcagtgttgaaactctctttttgtggaatctgcaagtggatatgtggacctctccgaagatgtctttggaaacgggaatatcttcacataaaaactaaacagaagcattctcagaaacttcttggtgatgtttgcattcaaatcccagagttgaaccttcctttgatagttcaggtttgaaacactctttctgtaggatctgcaagtggctatttggaccactctgtggccttcgttcgaaacgggtatatcttcgcataaaatctagacagaagcattctcagaaaatactttgtgatgattgagtttaaatcacagagctgaccattcctttggatggagcaggtttgagacacactttttgtagaatctacaagtggatatttggacctctctgaggatttcgttggaaacgggataactgcacctaactaaacggaagcattctcagaaactgctttgtgatgattgcattcacctcacagagttgaacattcctattgatagagcagtttggaaacactcttgttgtggaatgtgcaagtggagatttggagcgctttgaggcctatggtagtaaagggaatagcttcatagaaaaactagacagatgcattctcaggaactttttggtgatgtttgtattcaactcccagagttgaactttcctttggaaagagcagctatgaaacactctttttctagaatctgcaagtggacgtttggagggctttgtggtttgtggtggaaaaggaaatatcttcacctaaatactagatagaagcattctcagaagcttctctgtgatgactgcattcaactcacggagttgaacactccttttgagagcgcagttttgaaactctctttctgtggcatctgcaaggggacatgtagacctctttgaagatttcgttggaaacggaatcatcttcacataaaaactatacagaagcagtctcagaatcttctttgtgatgtttgcattcaaatcccagagttgaactttcctttcaaagttcacgtttgaaacactctttttgcaggatctacaagtggataattggaccactctgtgtccttcgttcgaaacgggtatatcgtcacatgacatctagacagaagctttctcagaaaattctttgggatgattgagtggaactcacagagctgaacattccttgcgatgtagcagtttagaaacacactttctgcagaatctgcaagtgcatatttggacctctctgaggaattcgttggaaacgggataatttcagctgactaaacagaagcattctcagaaccttcttcgtgatgtctgcattcaactcacagtgtggaacctttctttgatagttcaggtttgaaacactctttttgtagaaactgcaaggggataattgcacttctttgaggcctaccgtagtaaaggaaataacttcctatagaaagaagacagaagcattctcagaaccctcttcgtgatgtttgcattcaactcacagtgctgaacctttctttgatagttcagctttgaaacactcttcttgtagaaactgcaagtggatatttggtcctctctgaggatttcgttggaaacgggataaaccgcacagaactaaacagaagcattctcagagccctcttcgtgatgtttgcattcaactcacagtgctgaacctttctttgatagtgcagctttgaaacactctttttgtagaaactgcaagtggatgtttggtcctctctgaggatttccgttggaaacgggataaaccgcacagaactaaaacagaagcattctcagaaccttcttcgtgatgtttgcattcaactcacagtgttgaacctttctttgatagttcaggtttgaaacggtctttctgtagaaactgcaagtagatatttggacctctctgaggatttcgttagaaaccggataaaccgcacagaactaaaacagaagctttcacagaaaactcttggtgacgactgagtttaactcacagagctgaacattcctttggatggagcagtttcgaaacacactatttgtagaatgtgcaagtggatatgtgggcctctctgaggatttcgttggaaacgggataaaccgcccagaactaaacagaagcattctcagaaactactttgtgatgattgcattcaagtcacagtagttgaacattccctttgacagagcagtttggaaactctctttgtgtagaatctgcaagtggagatatggaccgctttgaggcctatggtagtaaaggaaatagcttcatataaaagctagacagtagcattctcagaaacttctttgtgatgcttgcattcaactcacagagttgaactttcctttcgagagagaagctttgaaacactctttttccagaatctgcaagtggacatttggagggctttgaggcctgtggtggaaaaggaattatcttcccgtaaaagctagatagaagcattgtcagaaacttctttgtgatgattgcattcaactcacagagttgaaggttccttttcaaagagcagtttccaatcactctttgtgtggaatctgcaagtggatatttggacctattttgaagatttcgttggaaacgggagaatcttcacaggaaagctaaacagaagcattctcagaaacttctctgtgatgtttgtgttcaactcccagagtttcacattgcttttcatagagtagttctgaaacatgcttttcgtagtgtctacaagtggacatttggagcgctttcaggcctgtggtggaaaacgagttatggtcacataaaaactggagagaagccttctcagaaacttctctgtgatgattgcattcaactcacagagttgaaccctcctatggatagagcagtgttgaaactctctttttgtggaatctgcaagtggatatgtggacctctccgaagatgtctttggaaacgggaatatcttcacataaaaactaaacagaagcattctcagaaacttcttggtgatgtttgcattcaaatcccagagttgaaccttcctttgatagttcaggtttgaaacactctttttgtaggatctgcaagtggatatttggaccactctgtggccttcgttcgaaacgggtatatcttcgcataaaatctagacagaagcattctcagaaaatactttgtgatgattgagtttaaatcacagagctgaacattcctttggatggagcaggtttgagacacactttttgtagaatctacaagtggatatttggacctctctgaggatttcgttggaaacgggataactgcacctaactaaacggaagcattctcagaaactgcattgtgatgattgcattcacctcacagagttgaacattcctattgatagagcagtttggaaacactcttgttgtggaatgtgcaagtggagatttggagcgctttgaggcctatggtagtaaagggaatagcttcatagaaaaactagacagatgcattctcaggaactttttggtgatgtttgtattcaactcccagagttgaactttcctttggaaagagcagctatgaaacactctttttctagaatctacaagtggacgtttggagggctttgtggtttgtggtggaaaaggaaatatcttcacctaaatactagagagaagcattctcagaagcttctctgtgatgactgcattcaactcacggagttgaacactccttttgagagcgcagttttgaaactccctttctgtggcatctgcaaggggacatgtagacctctttgaagatttcgttggaaacggaatcatcttcacataaaaactatacagaagcagtctcagaatcttctttgtgatgtttgcattcaaatcccagagttgaaatttcctttcaaagttcacgtttgaaacactctttttgcaggatctacaagtggatatttggaccactctgtgtccttcgttcgaaacaggtctatcttcacatgacatctagacagaagctttctcagaaaattctttgggatgattgagttgaactcacagagctgaacattccttgcgatgtagcagtttagaaacacactttctgcagaatctgcaagtgcatatttggacctctctgaggaattcgttggaaacgggataatttcagctgactaaacagaagcattctcagaaccttcttcgtgatgtctgcattcaactcacagtgtggaacctttctttgatagttcaggtttgaaacactctttttgtagaaactgcaaggggataattgcacttctttgaggcctaccgtagtaaaggaaataacttcctataaaaagaagacagaagcattctcagaaccctcttcgtgatgtttgcattcaactcacagtgctgaacctttctttgatagttcagctttgaaacactcttcttgtagaaactgcaagtggatatttggtcctctctgaggatttcgttggaaacgggataaaccgcacagaactaaacagaagaattctcagagccctcttcgtgatgtttgcattcaactcacagtgctgaacctttctttgatagtgcagctttgaaacactctttttgtagaaactgcaagtggatatttggtcctctctgaggatttcgttggaaacgggataaaccgcacagaactaaaacagaagcattcacagaaaactcttggtgacgactgagtttaactcacagagctgaacattcctttggatggagcagtttcgaaacacactatttgtagaatctgcaagtggatatttgggcctctctgaggatttcgttggaaacgggataaaacgcacagaactaaaacagaagcattctcagaaactactttgtgatgattgcattcaagtcacagagttgaacattccctttgacagagcagtttggaaactctctttgtgtagaatctgcaagtggagatatggaccgctttgaggcctatggtagtaaaggaaatagcttcatataaaagctagacagtagcattctcagaaaacttctttgtgatgcttgcattcaactcacagagttgaactttcctttcgagagagaagctttgaaacactctttttccagaatgtgcaagtggacatttggggagctttgaggcctgtggtggaaaaggaattatcttcccgtaaaagctagatagaagcattgtcagaaacttctttgtgatgattgcattcaactcacaggagttgaaggttccttttcaaacagcagtttccaatcactctttctgtggaatctgcaagtggatatttcgacctctttgaagatttcgttggaaacgggagaatcttcacagaaaagctaaacagaagcattctcagaaacttctctgtgatgtttgtgttcaactcccagagtttcacgttgcttttcatagagtagttctgaaacatgcttttcgtagtgtctgcaagtggacatttggagcgctttcaggcctgtggtggaaaacgaattatggtcacataaaaactggagagaagccttctcagaaacttctctgtgatgattgcattcaactcacagagttgaaccctcctatggatagagcagtgttgaaactctctttttgtggaatctgcaagtggatatgtggagctctccgaagatgtctttggaaacgggaatatcttcacataaaaactaaacagaagcattctcagaaacttcttggtgatgtttgcattcaaatcccagagttgaaccttcctttgatagttcaggtttgaaacactctttttgtaggatctgcaagtggatatttggaccactctgtggccttcgttcgaaacgggtatatcttcgcataaaatctagacagaagcattctcagaaaatactttgtgatgattgagtttaaatcacagagctgaacattcctttggatggagcaggtttgagacacactttttgtagaatctacaagtggatatttggacctctctgaggatttcgttggaaacgggataactgcacctaactaaacggaagcattctcagaaactgctttgtgatgattgcattcacctcacagagttgaacattcctattgatagagcagtttggaaacactcttgttgtggaatgtgcaagtggagatttggagcgctttgaggtctatggtagtaaagggaatagcttcatagaaaaactagacagatgcattctcaggaactttttggtgatgtttgtattcaactcccagagttgaactttcctttggaaagagcagctatgaaacactctttttctagaatctgcaagtggacgtttggagggctttgtggtttgtggtggaaaaggaaatatcttcacctaaatactagatagaagcattctcagaagcttctctgtgatgactgcattcaactcacggagttgaacactccttttgagagcgcagttttgaaactctctttctgtggcatccgcatggggacatgtagacctctttgaagatttcgttggaaacggaatcatcttcacataaaaactatacagaagcagtctcagaatcttctttgtgatgtttgcattcaaatcccagagttgaactttcctttcaaagttcacgtttgaaacactctttttgcaggatctacaagtggatatttggaccactctgtgtccttcgttcgaaacgggtatatcttcacatgacatctagacagaagctttctcagaaaattctttgggatgattgagtggaactcacagagctgaacattccttgcgatgtagcagtttagaaacacactttctgcagaatctgcaagtgcatatttggacctctctgaggaattcgttggaaacgggataatttcagctgactaaacagaagcattctcagaaccttcttcgtgatgtctgcattcaactcacagtgtggaacctttctttgatagttcaggtttgaaacactctttttgtagaaactgcaaggggataattgcacttctttgaggcctaccgtagtaaaggaaataacttcctatagaaagaagacagaagcattctcagaaccctcttcgtgatgtttgcattcaactcacagtgctgaacctttctttgatagttcagctttgaaacactcttcttgtagaaactgcaagtggatatttggtcctctctgaggatttcgttggaaacgggataaaccgcacagaactaaacagaagaattctcagagccctcttcgtgatgtttgcattcaactcacaagtgctgaacctttctttgatagtgcagctttgaaacactctttttgtagaaactgcaagtggatgtttggtcctctctgaggatttcgttggaaacgggataaaccgcacagaactaaaacagaagcattcacagaaaactcttggtgacgactgagtttaactcacagagctgaacattcctttggatggagcagtttcgaaacacactatttgtagaatctgcaagtggatatttgggcctctctgaggatttcgttggaaacgggataaaacgcacagaactaaaacagaagcattctcagaaactactttgtgatgattgcattcaagtcacagagttgaacattccctttgacagagcagtttggaaactctctttgtgtagaatctgcaagtggagatatggaccgctttgaggcctatggtagtaaaggaaatagcttcatataaaagctagacagtagcattctcagaaacttctttgtgatgcttgcattcaactcacagagttgaactttcctttcgagagagaagctttgaaacactctttttccagaatgtgcaagtagacatttggggagctttgaggcctgtggaggaaaaggaattatcttcccgtaaaagctagatagaagcattgtcagaaacttctttgtgatgattgcattcaactcacagagttgaaggttccttttcaaacagcagtttccaatcactctttctgtggaatctgcaagtggatatttcgacctctttgaagatttcgttggaaacgggagaatcttcacagaaaagctaaacagaagcattctcagaaacttctctgtgatgtttgtgttcaactcccagagtttcacgttgcttttcatagagtagttctgaaacatgcttttcgtagtgtctgcaagtggacatttggagcgctttcaggcctgtggtggaaaacgaattatggtcacttaaaaactggagagaagccttctcagaaacttctctgtgatgattgcattcaactcacagagttgaaccctcctatggatagagcagtgttgaaactctctttttgtggaatctgcaagtggatatgtggacctctccgaagatgtctttggaaacgggaatatcttcacataaaaactaaacagaagcattctcagaaacttcttggtgatgtttgcattcaaatcccagagttgaaccttcctttgatagttcaggtttgaaacactctttttgtaggatctgcaagtggctatttggaccactctgtggccttcgttcgtaacgggtatatcttcgcataaaatctagacagaagcattctcagaaaatactttgtgatgattgagtttaaatcacagagctgaacattcctttggatggagcaggtttgagacacactttttgtagaatctacaagtggatatttggacctctctgaggatttcgttggaaacgggataactgcacctaactaaacggaagcattctcagaaactgctttgtgatgattgcattcacctcacagagttgaacattcctattgatagagcagtttggaaacactcttgttgtggaatgtgcaagtggagatttggagcgctttgaggcctatggtagtaaagggaatagcttcatagaaaaactagacagatgcattctcaggaactttttggtgatgtttgtattcaactcccagagttgaactttcctttggaaagagcagctatgaaacactctttttctagaatctgcaagtggacgtttggagggctttgtggtttgtggtggaaaaggaaatatcttcacctaaatactagatagaagcattctcagaagcttctctgtgatgactgcattcaactcacggagttgaacactccttttgagagcgcagttttgaaactctctttctgtggcatctgcaaggggacatgtagacctctttgaagatttcgttggaaacggaatcatcttcacataaaaactatacagaagcagtctcagaatcttctttgtgatgtttgcattcaaatcccagagttgaactttcctttcaaagttcacgtttgaaacactctttttgcaggatctacaagtggatatttggaccactctgtgtccttcgttcgaaacgggtatatcttcacacgacatctagacagaagctttctcagaaaattctttgggatgattgagtggaactcacagagctgaacattccttgcgatgtagcagtttagaaacacactttctgcagaatctgcaagtgcatatttggacctctctgaggaattcgttggaaacgggataatttcagctgactaaacagaagcattctcagaaccttcttcgtgatgtctgcattcaactcacagtgtggaacctttctttgatagttcaggtttgaaacactctttttgtagaaactgcaaggggataattgcacttctttgaggcctaccgtagtaaaggaaataacttcctatagaaagaagacagaagcattctcagaaccctcgtcgtgatgtttgcattcaactcacagtgctgaacctttctttgatagttcagctttgaaacactcttcttgtagaaactgcaagtggatatttggtcctctctgaggatttcgttggaaacgggaaaaaccgcacagaactaaacagaagcattctcagaaccttcttcgtgatgtttgcattcaactcacagtgttgaacctttctttgatagttcaggttggaaacggtctttctgtagaaactgcaagtagatatttggacctctctgaggatttcgttggaaacgggataaaccgcacagaactaaaacagaagcattcatagaaaactcttggtgacgactgagtttaactcacagagctgaacattcctttggatggagcagtttcgaaacacactatttgtagaatgtgcaagtggatatttgggcctctctgaggattttgttggaaaccggataaaccgcacagaactaaacagaagcattctcagaaactactttgtgatgattgcattcaagtcacagagttgaacattccctttgacagagcagtttggaaactctctttgtgtagaatctgcaagtggagatatggaccgctttgaggcctatggtagtaaaggaaatagcttcatataaaagctagacagtagcattctcagaaacttctttgtgatgcttgcattcaactcacagagttgaactttcctttcgagagagaagctttgaaacactctttttccagaatgtgcaagtggacatttggagggctttgaggcctgtggtggaaaaggaattatcttcccgtaaaagctagatggaagtattgtcagaaacttctttgtgatgattgcattcaactcacagagttgaaggttccttttcaaacagcagtttccaatcactctttctgtggaatctgcaagtggatatttggacctattttgaagatttcgttggaaacgggataatcttcacagaaaagctaaacagaagcattctcagaaacttctctgtgatgtttgtgttcaactcccagagtttcacattgcttttcatagagtagttctgaaacatgcttttcgtagtgtctgcaagtggacatttggagcgctttcaggcctgtggtggaaaacgaattatggtcacataaaaactggagagaagccttctcagaaacttctctgtgatgattgcattcaactcacagagttgaaccctcctatggatagagcagtgttgaaactctctttttgtggaatctgcaagtggatatgtggacctctccgaagatgtctttggaaacgggaatatcttcacataaaaactaaacagaagcattctcagaaacttcttggtgatgtttgcattcaaatcccagaggtgaaccttcctttgatagttcaggtttgaaacactctttttgtaggatctgcaagtggctatttggaccactctgtggccttcgttcgaaacgggtatatcttcgcataaaatctagacagaagcattctcagaaaatactttgtgatgattgagttgaactcacagagctgaacattcctttggatggagcaggtttgagacacactttttgtagaatctacaagtggatatttggacctctctgaggatttcgttggaaacgggataactgcacctaactaaacggaagcattctcagcaaactgctttgtgatgactgcattcacctcacagagttgaacattcctattgatagagcagtttggaaacactcttgttgtggaatgtgcaagtggagatttggagcgctttgaggcctatggtagtaaagggaatagcttcatagaaaaactagacagatgcattctcaggaactttttggtgatgtttgtattcaactcccagagttgaactttcctttggaaagagcagctatgaaacaccctttttctagaatctgcaagtggacgtttggagggctttgtggtttgtgggtggaaaaggaaatatcttcacctaaatactagatagaagcattctcagaagcttctctgtgatgactgcattcaactcacggagttgaacactccttttgagagcgcagttttgaaactctctttctgtggcatctgcaaggggacatgtagacctctttgaagatttcgttggaaacggaatcatcttcacataaaaactatacagaagcagtctcagaatcttctttgtgatgtttgcattcaaatcccagagttgaactttcctttcaaagttcacgtttgaaacactctttttgcaggatctacaagtggatatttggaccactctgtgtccttcgttcgaaacgggtatatcttcacacgacatctagacagaagctttctcagaaaattctttgggatgattgagtggaactcacagagctgaacattccttgcgatggagcagtttagaaacacactttctgcagaatctgcaagtgcatatttggacctctctgaggaattcgttggaaacgggataatttcagctgactaaacagaagcattctcagaaccttcttcgtgatgtctgcattcaactcacagtgtggaacctttctttgatagttcaggtttgaaacactctttttgtagaaactgcaaggggataattgcacttctttgaggcctaccgtagtaaaggaaataacttcctatagaaagaagacagaagcattctcagaaccctcttcgtgatgtttgcattcaactcacagtgctgaacctttctttgatagttcagctttgaaacactcttcttgtagaaactgcaagtggatatttggtcctctctgaggatttcgttggaaacgggataaaccgcacagaactaaacagaagaattctcagagccctcttcgtgatgtttgcattcaactcacagtgctgaacctttctttgatagtgcagctttgaaacactctttttgtagaaactgcaagtggatgtttggtcctctctgaggatttcgttggaaacgggataaaccgcacagaactaaaacagaagcattgtcagaaacttctttgtgatgattgcattcaactcacagagttgaaggttccttttcaaacagcagtttccaatcactctttctgtggaatctgcaagtggatatttgggcctctctgaggatttcgttggaaacgggataaaacgcacagaactaaaacagaagcattctcagaaacttctctgtgatgtttgtgttcaactcccagagtttcacgttgcttttcatagagtagttctgaaacatgcttttcgtagtgtctgcaagtggacatttggagcgctttcaggcctgtggtggaaaacgaattatggtcacataaaaactggagagaagccttctcagaaacttctctgtgatgattgcattcaactcacaggagttgaaccctcctatggatagagcagtgttgaaactctctttttgtggaatctgcaagtggatatgtggacctctccgaagatgtctttggaaacgggaatatcttcacataaaaactaaacagaagcattctcagaaacttcttggtgatgtttgcattcaaatcccagagttgaaccttcctttgatagttcaggtttgaaacactctttctgtaggatctgcaagtggctatttggaccactactgtggccttcgttcgaaacgggtatatcttcgcataaaatctagacagaagcattctcagaaaatactttgtgatgattgagtttaaatcacagagctgaccattcctttggatggagcaggtttgagacacactttttgtagaatctacaagtggatatttggacctctctgaggatttcgttggaaacgggataactgcacctaactaaacggaagcattctcagaaactgctttgtgatgattgcattcacctcacagagttgaacattcctattgatagagcagtttggaaacactcttgttgtggaatgtgcaagtggagatttggagcgctttgaggcctatggtagtaaagggaatagcttcatagaaaaactagacagatgcattctcaggaactttttggtgatgtttgtattcaactcccaagagttgaactttcctttggaaagagcagctatgaaacactctttttctagaatctgcaagtggacgtttggagggctttgtggtttgtggtggaaaaggaaatatcttcacctaaatactagatagaagcattctcagaagcttctctgtgatgactgcattcaactcacggagttgaacactccttttgagagcgcagttttgaaactctctttctgtggcatccgcaaggggacatgtagacctgtttgaagatttctttggaaagggaatcatcttcacataaaaactatacagaagcagtctcagaatcttctttgtgatgtttacattcaaatcccagagttgaactttcctttcaaagttcacgtttgaaacactctttttgcaggatctacaagtggatatttggaccactctgtgtccttcgttccaaacgggtatatcttcacatgacatctagacagaagctttctcagaaaattctttgggatgattgagtggaactcacagagctgaacattccttgcgatggagcagtttagaaacacactttctgcagaatctgcaagtgcatatttggacctctctgaggaattcgttggaaacgggataatttcagctgactaaacagaagcattctcagaaccttcttcgtgatgtctgcattcaactcacagtgtggaacctttctttgatagttcaggtttgaaacactctttttgtagaaactgcaaggggataattgcacttctttgaggcctaccgtagtaaaggaaataacttcctatagaaagaagacagaagcattctcagaaccctcttcgtgatgtttgcattcaactcacagtgctgaacctttctttgatagttcagctttgaaacactcttcttgtagaaactgcaagtggatatttggtcctctctgaggatttcgttggaaacgggataaaccgcacagaactaaacagaagaattctcagagccctcttcgtgatgtttgcattcaactcacagtgctgaacctttctttgatagtgcagctttgaaacactctttttgtagaaactgcaagtggatgtttggtcctctctgaggatttcgttggaaacgggataaaccgcacagaactaaaacagaagcattgtcagaaacttctttgtgatgattgcattcaactcacagagttgaaggttccttttcaaacagcagtttccaatcactctttctgtggaatctgcaagtggatatttgggcctctctgaggatttcgttggaaacgggataaaacgcacagaactaaaacagaagcattctcagaaacttctctgtgatgtttgtgttcaactcccagagtttcacgttgcttttcatagagtagttctgaaacatgcttttcgtagtgtctgcaagtggacatttggagcgctttcaggcctgtggtggaaaacgaattatggtcacataaaaactggagagaagccttctcagaaacttctctgtgatgattgcattcaactcacagagttgaaccctcctatggatagagcagtgttgaaactctctttttgtggaatctgcaagtggatatgtggacctctccgaagatgtctttggaaacgggaatatcttcacataaaaactaaacagaagcattctcagaaacttcttggtgatgtttgcattcaaatcccagagttgaaccttcctttgatagttcaggtttgaaacactctttctgtaggatctgcaagtggctatttggaccactctgtggccttcgttcgaaacgggtatatcttcgcataaaatctagacagaagcattctcagaaaatactttgtgatgattgagtttaaatcacagagctgaccattcctttggatggagcaggtttgagacacactttttgtagaatctacaagtggatatttggacctctctgaggatttcgttggaaacgggataactgcacctaactaaacggaagcattctcagaaactgctttgtgatgattgcattcacctcacagagttgaacattcctattgatagagcagtttggaaacactcttgttgtggaatgtgcaagtggagatttggagcgctttgaggcctatggtagtaaagggaatagcttcatagaaaaactagacagatgcattctcaggaactttttggtgatgtttgtattcaactcccagagttgaactttcctttggaaagagcagctatgaaacactctttttctagaatctgcaagtggacgtttggagggctttgtggtttgtggtggaaaaggaaatatcttcacctaaatactagatagaagcattctcagaagcttctctgtgatgactgcattcaactcacggagttgaacactccttttgagagcgcagttttgaaactctctttctgtggcatctgcaaggggacatgtagacctctttgaagatttcgttggaaacggaatcatcttcacataaaaactatacagaagcagtctcagaatcttctttgtgatgtttgcattcaaatcccagagttgaacttccctttcaaagttcacgtttgaaacactctttttgcaggatctacaagtggatatttggaccactctgtgtccttcgttcgaaacgggtatatcttcacatggcatctagacagaagctttctcagaaaattctttgggatgattgagttgaactcacagagctgaacattccttgcgatgtagcagtttagaaacacactttctgcagaatctgcaagtgcatatgtggacctctctgaggaattcgttggaaacgggataatttcagctgactaaacagaagcattctcagaaccttcttcgtgatgtctgcattcaactcacagtgtggaacctttctttgatagttcaggtttgaaacactctttttgtagaaactgcaaggggataattgcacttctttgaggcctaccgtagtaaaggaaataacttcctatagaaagaagacagaagcattctcagaaccctcttcgtgatgtttgcattcaactcacagtgctgaacctttctttgatagttcagctttgaaacactcttcttgtagaaactgcaagtggatatttggtcctctctgaggatttcgttggaaacgggataaaccgcacagaactaaacagaagaattctcagagccctcttcgtgatgtttgcattcaactcacagtgctgaacctttctttgatagtgcagctttgaaacactctttttgtagaaactgcaagtggatgtttggtcctctctgaggatttcgttggaaacgggataaaccgcacagaactaaaacagaagcattgtcagaaacttctttgtgatgattgcattcaactcacagagttgaaggttccttttcaaacagcagtttccaatcactctttctgtggaatctgcaagtggatatttgggcctctctgaggatttcgttggaaacgggataaaacgcacagaactaaaacagaagcattctcagaaacttctctgtgatgtttgtgttcaactcccagagtttcacgttgcttttcatagagtagttctgaaacatgcttttcgtagtgtctgcaagtggacatttggagcgctttcaggcctgtggtggaaaacgaattatggtcacataaaaactggagagaagccttctcagaaacttctctgtgatgattgcattcaactcacagagttgaaccctcctatggatagagcagtgttgaaactctctttttgtggaatctgcaagtggatatgtggacctctccgaagatgtctttggaaacgggaatatcttcacataaaaactaaacagaagcattctcagaaacttcttggtgatgtttgcattcaaatcccagagttgaaccttcctttgatagttcaggtttgaaacactctttctgtaggatctgcaagtggctatttggaccactctgtggccttcgttcgaaacgggtatatcttcgcataaaatctagacagaagcattctcagaaaatactttgtgatgattgagtttaaatcacagagctgaccattcctttggatggagcaggtttgagacacactttttgtagaatctacaagtggatatttggacctctctgaggatttcgttggaaacgggataactgcacctaactaaacggaagcattctcagaaactgctttgtgatgattgcattcacctcacagagttgaacattcctattgatagagcagtttggaaacactcttgttgtggaatgtgcaagtggagatttggagcgctttgaggcctgtggtagtaaagggaatagcttcatagaaaaactagacagatgcattctcaggaaccttttggtgatgtttgtattcaactcccagagttgaactttcctttggaaagagcagctatgaaacactctttttctagaatctgcaagtggacgtttggagggctttgtggtttgtggtggaaaaggaaatatcttcacctaaatactagatagaagcattctcagaagcttctctgtgatgactgcattcaactcacggagttgaacactccttttgagagcgcagttttgaaactctctttctgtggcatctgcaaggggacatgtagacctctttgaagatttcgttggaaacggaatcatcttcacataaaaactatacagaagcagtctcagaatcttctttgtgatgtttgcattcaaatcccagagttgaactttcctttcaaagttcacgtttgaaacactctttttgcaggatctacaagtggatatttggaccactctgtgtccttcgttcgaaacgggtatatcttcacacgacatctagacagaagctttctcagaaaattctttgggatgattgagtggaactcacagagctgaacattccttgcgatgtagcagtttagaaacacactttctgcagaatctgcaagtgcatatttggacctctctgaggaattcgttggaaacgggataatttcagctgactaaacagaagcattctcagaaccttcttagtgatgtctgcattcaactcacagtgtggaacctttctttgatagttcaggtttgaaacactctttttgtagaaactgcaaggggataattgcacttctttgaggcctaccgtagtaaaggaaataacttcctatagaaagaagacagaagcattctcagaaccctcttcgtgatgtttgcattcaactcacagtgctgaacctttctttgatagttcagctttgaaacactcttcttgtagaaactgcaagtggatatttggtcctctctgaggatttcgttggaaacgggataaaccgcacagaactaaacagaagaattctcagagccctcttcgtgatgtttgcattcaactcacagtgctgaacctttctttgatagtgcagctttgaaacactctttttgtagaaactgcaagtggatgtttggtcctctctgaggatttcgttggaaacgggataaaccgcacagaactaaaacagaagcattgtcagaaacttctttgtgatgattgcattcaactcacagagttgaaggttccttttcaaacagcagtttccaatcactctttctgtggaatctgcaagtggatatttgggcctctctgaggatttcgttggaaacgggataaaacgcacagaactaaaacagaagcattctcagaaacttctctgtgatgtttgtgttcaactcccagagtttcacgttgcttttcatagagtagttctgaaacatgcttttcgtagtgtctgcaagtggacatttggagcgctttcaggcctgtggtggaaaacgaattatggtcacataaaaactggagagaagccttctcagaaacttctctgtgatgattgcattcaactcacagagttgaaccctcctatggatagagcagtgttgaaactctctttttgtggaatctgcaagtggatatgtggacctctccgaagatgtctttggaaacgggaatatcttcacataaaaactaaacagaagcattctcagaaacttcttggtgatgtttgcattcaaatcccagagttgaaccttcctttgatagttcaggtttgaaacactctttctgtaggatctgcaagtggctatttggaccactctgtggccttcgttcgaaacgggtatatcttcgcataaaatctagacagaagcattctcagaaaatactttgtgatgattgagtttaaatcacagagctgaccattcctttggatggagcaggtttgagacacactttttgtagaatctacaagtggatatttggacctctctgaggatttcgttggaaacgggataactgcacctaactaaacggaagcattctcagaaactgctttgtgatgattgcattcacctcacagagttgaacattcctattgatagagcagtttggaaacactcttgttgtggaatgtgcaagtggagatttggagcgctttgaggcctatggtagtaaagggaatagcttcatagaaaaactagacagatgcattctcaggaactttttggtgatgtttgtattcaactcccagagttgaactttcctttggaaagagcagctatgaaacactctttttctagaatctgcaagtgaacgtttggagggctttgtggtttgtggtggaaaaggaaatatcttcacctaaatactagatagaagcattctcagaagcttctctgtgatgactgcattcaactcacggagttgaacactccttttgagagcgcagttttgaaactctctttctgtggcatctgcaaggggacatgtagacctctttgaagatttctttggaaacggaatcatcttcacataaaaactatacagaagcagtctcagaatcttctttgtgatgtttgcattcaaatcccagagttgaactttcctttcaaagttcacgtttgaaacactctttttgcaggatctacaagtggatatttggaccactctgtgtccttcgttcgaaacgggtatatcttcacatgacatctagacagaagctttctcagaaaattctttgggatgattgagtggaactcacagagctgaacattccttgcgatgtagcagtttagaaacacactttctgcagaatctgcaagtgcatatttggacctctctgaggaattcgttggaaaagggataatttcagctgactaaacagaagcattctcagaaccttcttcgtgatgtctgcattcaactcacagtgtggaacctttctttgatagttcaggtttgaaacactctttttgtagaaactgcaaggggataattgcacttctttgaggcctaccgtagtaaaggaaataacttcctatagaaagaagacagaagcattctcagaaccctcttcgtgatgtttgcattcaactcacagtgctgaacctttctttgatagttcagctttgaaacactcttcttgtagaaactgcaagtggatatttggtcctctctgaggatttcgttggaaaagggataaaccgcacagaactaaacagaagcattctcagaaccttcttcgtgatgtttgcattcaactcacagtgttgaacctttctttcatagttcaggtttgaaacggtctttctgtagaaactgcaagtagatatttggacctctctgaggatttcgttggaaacgggatgaaccgcacagaactaaaacagaagcattcacagaaaactcttggtgacgactgagtttaactcacagagctgaacattcctttggatggagcagtttcgaaacacactatttgtagaatgtgcaagtggatatttgggcctctctgaggatttcgttggaaacgggataaaccgcacagaactaaacagaagcattctcagaaactactttgtgatgattgcattcaagtcacagagttgaacattccctttgacagagcagtttggaaactctctttgtgtagaatctgcaagtggagatatggaccgctttgaggcctatggtagtaaaggaaatagcttcatataaaagctagacagtagcattctcagaaacttctttgtgatgcttgcattcaactcacagagttgaactttcctttcgagagagaagctttgaaacactctttttccagaatctgcaagtggacatttggagggctttgaggcctgtggtggaaaaggaattaacttcccgtaaaagctagatagaagcattgtcagaaacttctttgtgatgattgcattcaactcacagagatgaaggttcctttacaaacagcagtttccaaacactctttctgtggaatctgcaagtggatatttggacctctttgaagatttcgttggaaacgggagaatcttcacagaaaatctaaacagaagcattctcagtaaacttctctgtgatgtttgtgttcaactcccagagtttcacattgcttctcatagagtagttctgaaacatgcttttcgtagtgtctgcaagtggtcatttggagcgctttccggcctgtggtggaaaacgaattatggtcacataaaaactggagagaagccttctcagaaacttctctgtgatgtttgcattcaactcacagagttgaaccctcctatggatagagcagtgttgaaactctctttttgtggaatctgcaagtggatatgtggacctctccgaagatgtctttggaaacgggaatatcttcacataaaaactaaacagaagcattctcagaaacttcttggtgatgtttgcattcaaatcccagagttgaaccttcctttgatagttcaggtttgaaacactctttttgtaggatcttcaagtggatatttggaccactctgtggccttcgttcgaaacgggtatatcttcgcataaaatctagacagaagcattctcagaaaatactttgtgatgattgagtttaactcacagagctgaacattcctttggatggagcaggtttgagacacactttttgtagaatctacaagtggatatttggacctctctgaggatttcgttggaaacgggataactgcacctaactaaacggaagcattctcagaaactgctttgtgatgattgcattcacctcacagagttgaacattcctattgatagagcagtttggaaacactcttgttgtggaatgtgcaagtggagatttggagcgctttgaggcctatggtagtaaagggaatagcttcatagaaaaactagacagatgcattctcaggaactttttggtgatgtttgtattcaactcccagagttgaactttcctttggaaagagcagctatgaaacactctttttctagaatctgcaagtggacgtttggagggctttgtggtttgtggtggaaaaggaaatatcttcacctaaatactagatagaagcattctcagaagcttctctgtgatgactgcattcaactcacggagttgaacactccttttgagagcgcagttttgaaactctctttctgtggcatctgcaaggggacatgtagacctctttgaagatttcgttggaaacggaatcatcttcacataaaaactatacagaagcagtctcagaatcttctttgtgatgtttgcattcaaatcccagagttgaactttcctttcaaagttcacgtttgaaacactctttttgcaggatctacaagtggatatttggaccactctgtgtccttcgttcgaaacgggtatatcttcacacgacatctagacagaagctttctcagaaaattctttgggatgattgagtggaactcacagagctgaacattccttgcgatgtagcagtttagaaacacactttctgcagaatctgcaagtgcatatttggacctctctgaggaattcgttggaaacgggataatttcagctgactaaacagaagcattctcagaaccttcttcgtgatgtctgcattcaactcacagtgtggaacctttctttgatagttcaggtttgaaacactctttttgtagaaactgcaaggggataattgcacttctttgaggcctaccgtagtaaaggaaataacttcctatagaaagaagacagaagcattctcagaaccctcttcgtgatgtttgcattcaactcacagtgctgaacctttctttgatagttcagctttgaaacactcttcttgtagaaactgcaagtggatatttggtcctctctgaggatttcgttggaaacgggataaaccgcacagaactaaacagaagaattctcagagccctcttcgtgatgtttgcattcaactcacagtgctgaacctttctttgatagtgcagctttgaaacactctttttgtagaaactgcaagtggatgtttggtcctctctgaggatttcgttggaaacgggataaaccgcacagaactaaaacagaagcattgtcagaaacttctttgtgatgattgcattcaactcacagagttgaaggttccttttcaaacagcagtttccaatcactctttctgtggaatctgcaagtggatatttgggcctctctgaggatttcgttggaaacgggataaaacgcacagaactaaaacagaagcattctcagaaacttctctgtgatgtttgtgttcaactcccagagtttcacattgcttttcatagagtagttctgaaacatgcttttcgtagtgtctacaagtggacatttggagcgctttcaggcctgtggtggaaaacgaattatggtcacataaaaactggagagaagccttctcagaaacttctctgtgatgattgcattcaactcacagagttgaaccctcctatggatagagcagtgttgaaactctctttttgtggaatctgcaagtggatatgtggacctctccgaagatgtctttggaaacgggaatatcttcacataaaaactaaacagaaggattctcagaaacttcttggtgatgtttgcattcaaatcccagagttgaaccttcctttgatagttcaggtttgaaacactctttttgtaggatctgcaagtggctatttggaccactcctgtggcattcgttcaaaacgggtatatcttcgcataaaatctagacagaagcattctcagaaaatactttgtgatgattgagttgaactcacagaggtgaacattcctttggatggagcaggtttgagacacactttttgtaaaatctacaagtggatatttggacctctctgaggatttcgttggaaacgggataactgcacctaactaaacggaagcattctcagaaactgctttgtgatgattgcattcacctcacagagttgaacattcctattgatagagcagtttggaaacactcttgttgtggaatgtgcaagtggagatttggagcgctttgaggcctatggtagtaaagggaatagcttcatagaaaaactagacagatgcattctcaggaactttttggtgatgtttgtattcaactcccagagttgaactttcctttggaaagagcagctgtgaaacactctttttctagaatctgcaagtggacgtttggagggctttgtggtttgtggtggaaaaggaaatatcttcacctaaatagtagagagaagcattctcagaagcttctctgtgatgactgcattcaactcacggagttgaacactccttttgagagcgcagttttggaactctctttctgtggcatctgcagggggacatgtagacctctttgaagatttcgttggaaacggaatcatcttcacatcaaaactatacagaagcagtctcagaatcttctttgtgatgtttgcattcaaatcccagagttgaactttcctttcaaagtttacgtttgaaacactctttttgcaggatctacaagtggatatttggaccactctgtgtccttcgttcgaaacgggtatatcttcacatgacatctagacagaagctttctcagaaaattgtttgggatgattgatttgaactcacagagctgagcattccttgcgatgtagcagtttagaaacacactttctgcagaatctgcaagtgcatatttggacctctctgaggaattcgttggaaacgggataatttcagctgactaaacagaagcattctcagaaccttcttcgtgatgtctgcattcaactcacagtgtggaacctttctttgatagttcaggtttgaaacactctttttgtagaaactgcaaggggataattgcactctttgaggagtaccgtagtaaaggaaataacttcctataaaaagaagacagaagcattctcagaaccctcttcgtgatgtttgcattcaactcacagtgctgaacctttctttgatagttcagctttgaaacactctttttgtagaaactgcaagtggatatttggtcctctctgaggatttcgttggaaaagggataaaacgcacagaactaaacagaagcattcacagaaaactcttggtgacgactgagtttaactcacagagctgaacattcctttggatggagcagtttcaaaacacactatttgtagaatctgcaagtggatatgtgggcctctctgaggatttcgttggaaacgggataaaccgcacagaactaaaacagaagcattctcagaaactactttgtgatgattgcattcaagtcacagagttgaacattccctttgacagagcagtttggaaactctctttgtgtagaatctgcaagtggagatatggaccgctttgaggcctatggtagtaaaggaaatagcttcatataaaagctagacagtagcattctcagaaacttctttgtgatgcttgcattcaactcacagagttgaactttcctttcgagagagaagctttgaaacactctttttccagaatctgcaagtggacatttggagggctttgaggcctgtggtggaaaaggaattatcttcccgtaaaagctagatagaagcattgtcagaaacttctttgtgatgattgcattcaactcacagagttgaaggttccttttcaaagagcagtttccaatcactctttgtgtggaatctgcaagtggatatttggacctattttgaagatttcgttggaaacgggagaatcttcacaggaaagctaaacagaagcattctcagaaacttctctgtgatgtttgtgttcaactcccagagtttcacattgcttttcatagagtagttctgaaacatgcttttcgtagtgtctacaagtggacatttggagcgctttcaggcctgtggtggaaaacgaattatggtcacataaaaactggagagaaagccttctcagaaacttctctgtgatgattgcattcaactcacagagttgaaccctcctatggatagagcagtgttgaaactctctttttgtggaatctgcaagtggatatgtggacctctccgaagatgtctttggaaacgggaatatcttcacataaaaactaaacagagcattctcagaaacttcttggtgatgtttgcattcaaatcccagagttgaaccttcctttgatagttcaggtttgaaacactctttttgtaggatctgcaagtggatatttggaccactctgtggcctttgttcgaaacgggtacatcttcgcataaaatctagacagaagcattctcagaaaatactttgtgatgattgagttgaactcacagagctgaacattcctttggatggagcaggtttgagacacactttttgtagaatctacaagtggatatttggacctctctgaggatttcgttggaaacgggataactgcacctaactaaacggaagcattctcagaaactgctttgtgatgattgcattcacctcacagagttgaacattcctattgatagagcagtttggatacactcttgttgtggaatgtgcaagtggagatttggagcgctttgaggcctatggtagtaaagggaatagcttcatagaaaaactagacagatgcattctcaggaactttttggtgatgtttgtattcaactcccagagttgaactttcctttggaaagagcagctatgaaacactctttttctagaatctgcaagaggacgtttggagggctttgtggtttgtggtggaaaaggaaatatcttcacctaaatactagatagaagcattctcagaagcttctctgtgatgactgcattcaactcacggagttgaacactccttttgagagcgcagttttgaaactctctttctgtggcatctgcaaggggacatgtagacctctttgaagatttcgttggaaacggaatcatcttcacatcaaaactatacagaagcagtctcagaatcttctttgtgatgtttgcattcaaatcccagagttgaacttttctttccaagttgacgtttgaaacactctttttgcaggatctacaagtggatatttggaccactctgtgtccttcgttcgaaacgggtatatcttcacatgacatctagacagaagctttctcagaaaattctttgggatgattgagttgagcaaacagagctgaacactccttgcgatgtagcagtttagaaacacactttctgcagaatctgcaagtgcatatgtggacctctctgaggaattcgttggaaacgggataatttcagctgactaaacagaagcattctcagaaccctcttcgtgatgtttgcattcaactcacagtgtggaacctttctttgatagttcaggtttgaaacactctttttgtagaaactgcaaggggatcattgcacttctttgaggcctaccgtagtaaaggagataacttcctataaaaagaagacagaagcatcctcagaaccttcttcgtgatgtttgcattcaactcacagtgctgaacctttctttgatagttcagctttgaaacactctttttgtagaaactgcaagtggatatttggacgtctctgaggatttcgttggaaacgggataaaccgcacagaactaaaacagaagcattcacagaaaactcttggtgacgactgcgtttaactcacagagctgaaaatcccttaggatggagcagtttcgaaaaacactatttgtagaatgtgcaagtggatattggggcctctctgaggatttcgttggaaacgggataaaccacacagaactaaacagaagcattcacagaaaactcttggtgacgactgagtttaactcacagagctgaacattcctttggatggagcagtttcgaaacacactatttgtagaatgtgcaagtggatatttgggcctctctgaggatttcgttggaaacgggataaaccgcacagaactaaacagaagcattctcagaaactactttgtgatgattgcattcaagtcacagagttgaacattccctttgacagagcagtttggaaactctctttgtgtagaatctgcaagtggagatatggaccgctttgaggcctatggtagtaaaggaaatagcttcatataaaagctagacagtagcattctcagaaacttctttgtgatgcttgcattcaactcacagagttgaactttcctttcgagagagaagctttgaaacactctttttccagaatctgcaagtggacatttggagggctttgaggcctgtggtggaaaaggaattatcttcccgtaaaagctagatagaagcattgtcagaaacttctttgtgatgattgcattcaactcacagagttgaaggttccttttcaaacagcagtttccaatcactctttctgtggaatctgcaagtggatatttggacctctttgaagatttcgttggaaacgggagaatgttcacagaaaagctaaacagaagcattctcagaaacttctctgtgatgtttgtgttcaactcccagagtttcacattgcttctcatagagtagttctgaaacatgcttttcgtagtgtctgcaattggacatttggagcgctttcaggcctgtggtggaaaacgaattatggtcacataaaaactggagagaagccttctcagaaacttctctgtgatgattgcattcaactcacagagttgaaccgtcctctggatagagcagtgttgaaactctctttttgtggaatctgcaagtggatatgtggacctctccgaagatgtctttggaaacgggaatatcttcacataaaaactaaacagaagcattctcagaaacttcttggtgatgtttgcattcaaatcccagagttgaaccttcctttgagagttcaggtttgaaacactctttttgtaggatctgcaagtggatatttggaccactctgtggccttcgttcaaaacgggtacatcttcgcataaaatctagacagaagcattctgagaaaatactttgtgatgatagagttgaactcacagagctgaacattcctttggatggagcaggtttgagacacactttttgtagaatctacaagtggatatttggacctctctgaggatttcgttggaaacgggataactgcacctaactaaacggaagcattctcagaaactgctttgtgatgattgcattcacctcacagagttgaacattcctattgatagagcagtttggaaaaactcttgttgtggaatgtgcaagtggagatttggagcgctttgaggcctatggtagtaaagggaatagcttcatagaaaaactagacagatgcattctcaggaactttttggtgatgtttgtattcaactcccagagttgaactttcctttggaaagagcagctatgaaacactctttttctagaatctgcaagtggacgtttggagggctttgtggtttgtggtggaaaaggaaatatcttcacctaaatactagatagaagcattctcagaagcttctctgtgatgactgcattcaactcacggagttgaacactccttttgagagcgcagttttgaaactctctttctgtggcatctgcaacgggacatgtagacctctttgaagatttcgttggaaacggaatcatcttcacataaaaactatacagaagcagtctcagaatcttctttgtgatgtttgcattcaaatcccagagttgaactttcctttcaaagttcacgtttgaaacactctttttgcaggatctacaagtggatatttggaccactctgtgtccttcgttcgaaacgggtatatcttcacatgacatctagacagaagctttctcagaaaattctttgggatgattgagttgaactcatagagctgaacattccttgcgatgtagcagtttagaaacacactttctgcagaatctgcaagtgcatatttggacctctctgaggaattcgttggaaacgggataatttcagctgactaaacagaagcattctcagaaccttcttcgtgatgtctgcattcaactcacagtgtggaacctttctttgatagttcaggtttgaaacactctttttgtagaaactgcaaggggataattgcacttctttgaggcctaccgtagtaaaggaaataacttcctataaaaacaagacagaagcattctcagtaccttcttcgtgatgtttgcattcaactcacagtgctgaacctttctttgatagttcagctttgaaacactctttttgtagaaactgcaagtggatatttggtcctctgtgaggatttcgttggaaaagggataaaccgcacagaactaaacagaagcattcacagaaaactcttggtgacgactgagtttaactcacagagctgaacatccctttggatggagcagtttcgaaacacactatttgtagaatgtgcaagtggatattggggcctctctgaggatttcgttggaaacgggataaaccgcacagaactaaacagaagcattctcagaaactactttgtgatgattgcattcaagtcacagagttgaacattccctttgacagagcagtttggaaactctctttgtgtagaatctgcaagtggagatatggaccgctttgaggactatggtagtaaaggaaatagcttcatataaaagctaaacagtagcattctcagaaacttctttgtgatgcttgcattcaactcacagagttgaactttcctttcgagagagaagctttgaaacactctttttccagaatctgcaagtggacatttggagggctttgaggcctgtggtggaaaaggaattatcttcccgtaaaagctagatagaagcattgtcagaaacttctttgtgatgattgcattcaactcacagagttgaaggttccttttcaaacagcagtttccaatcactctttctgtggaatctgcaagtggatatttggacctctttgaagatttcgttggaaacgggagaatgttcacagaaaagctaaacagaagcattctcagaaacttctctgtgatgtttgtgttcaactcccagagtttcacgttgcttttcatagagtagttctgaaacatgcttttcgtagtgtctgcaagtggacatttggagcgctttcaggcctgtggtggaaaacgaattatggtcacataaaaactggagagaagccttctcagaaacttctctgtgatgattgcattcaactcacagagttgaaccctcctatggatagagcagtgttgaaactctctttttgtggaatctgcaagtggatatgtggacctctccgaagatgtctttggaaacgggaatatcttcacataaaaactaaacagaagcattctcagaaacttcttggtgatgtttgcattcaaatcccagagttgaaccttcctttgatagttcaggtttgaaacactctttctgtaggatctgcaagtggctatttggaccactctgtggccttcgttcgaaacgggtatatcttcgcataaaatctagacagaagcattctcagaaaatactttgtgatgattgagtttaaatcacagcagctgaccattcctttggatggagcaggtttgagacacactttttgtagaatctacaagtggatatttggacctctttgaggatttcgttggaaacgggataactgcacctaactaaacggaagcattctcagaaactgctttgtgatgattgcattcacctcacagagttgaacattcctattgatagagcagtttggaaacactcttgttgtggaatgtgcaagtggagatttggagcgctttgaggcctgtggtagtaaagggaatagcttcatagaaaaactagacagatgcattctcaggaacttctttttggtgatgtttgtattcaactcccagagttgaactttcctttggaaagagcagctatgaaacactctttttctagaatctgcaagtggacgtttggagggctttgtggtttgtggtggaaaaggaaatatcttcacctaaatactagatagaagcattctcagaagcttctctgtgatgactgcattcaactcacggagttgaacactccttttgagagcgcagttttgaaactctctttctgtggcatctgcaaggggacatgtagacctctttgaagatttcgttggaaacggaatcatcttcacataaaaactatacagaagcagtctcagaatcttctttgtgatgtttgcattcaaatcccagagttgaactttcctttcaaagttcacgtttgaaacactctttttgcaggatctacaagtggatatttggaccactctgtgtccttcgttcgaaacgggtataacttcacacgacatctagacagaagctttctcagaaaattctttgggatgattgagtggaactcacagaggtgaacattccttgcgatgtagcagtttagaaacacactttctgcagaatctgcaagtgcatatttggacctctctgaggaattcgttggaaacgggataatttcagctgactaaacagaagcattctcagaaccttcttcgtgatgtctgcattcaactcacagtgtggaacctttctttgatagttcaggtttgaaacactctttttgtagaaactgcaaggggataattgcacttctttgaggcctaccgtagtaaaggaaataacttcctatagaaagaagacagaagcattctcagaaccctcttcgtgatgtttgcattcaactcacagtgctgaacctttctttgatagttcagctttgaaacactcttcttgtagaaactgcaagtggatatttggtcctctctgaggatttcgttggaaacgggataaaccgcacagaactaaacagaagcattctcagaaccttcttcgtgatgtttgcattcaactcacagtgttgaacctttctttgatagttcaggttggaaatggtctttctgtagaaactgcaagtagatatttggacctctctgaggatttctttggaaacgggataaaccgcacagaactaaaacagaagcattcacagaaaactcttggtgacgactgagtttaactcacagagctgaacattcctttggatggagcagtttcgaaacacactatttgtagaatgtgcaagtggatatttgggcctctctgaggatttcgttggaaacgggataaaccgcacagaactaaacagaagcattctcagaaactactttgtgatgattgcattcaagtcacagagttgaacattccctttgacagagcagtttggaaactctctttgtgtagaatctgcaagtggagatatggaccgctttgaggcctatggtagtaaaggaaatagcttcatataaaagctagacagtcgcattctcagaaacttctttgtgatgcttgcattcaactcacagagttgaactttcctttcgagagagaagctttgaaacactctttttccagaatctgcaagtggacatttggagggctttgaggcctgtggtggaaaaggaattatcttcccgtaaaagctagatagaagcattgtcagaaacttctttgtgatgattgcattcaactcacagagatgaaggttcctttacaaacagcagtttccaaacactctttctgtggaatctgcaagtggatatttggacctctttgaagatttcgttggaaacgggagaatcttcacagaaaagctaaacagaagcattctcagaaacttctctgtgatgtttgtgttcaactcccagagtttcacattgcttttcatagagtagttctgaaacatgcttttcgtagtgtctgcaagtggacatttggagcgctttcaggcctgtggtgcaaaacgaactatggtcacataaaaactggagagaagccttctcagaaacttctctgtgatgattgcattcaactcacagagttgaaccctcctatggatagagcagtgttgaaactctctttttgtggaatctgcaagtggatatgtggacctctccgaagatgtctttggaaacgggaatatcttcacataaaaactaaacagaagcattctcagaaacttcttggtgatgtttgcattcaaatcccagagttgaaccttcctttgatagttcaggtttgaaacactctttctgtaggatctgcaagtggctatttggaccactctgtggccttcgttcgaaacgggtatatcttcgcataaaatctagacagaagcattctcagaaaatactttgtgatgattgagtttaaatcacagagctgaccattcctttggatggagcaggtttgagacacactttttgtagaatctacaagtggatatttggacctctctgaggatttcgttggaaacgggataactgcacctaactaaacggaagcattctcagaaactgctttgtgatgattgcattcacctcacagagttgaacattcctattgatagagcagtttggaaacactcttgttgtggaatgtgcaagtggagatttggagcgctttgaggcctgtggtagtaaagggaatagcttcatagaaaaactagacagatgcattctcaggaactttttggtgatgtttgtattcaactcccagagttgaactttcctttggaaagagcagctatgaaacactctttttctagaatctgcaagtggacgtttggagggctttgtggtttgtggtggaaaaggaaatatcttcacctaaatactagatagaagcattctcagaagcttctctgtgatgactgcattcaactcacggagttgaacactccttttgagagcgcagttttgaaactctctttctgtggcatctgcaaggggacatgtagacctctttgaagatttcgttggaaacggaatcatcttcacataaaaactatacagaagcagtctcagaatcttctttgtgatgtttgcattcaaatcccagagttgaactttcctttcaaagttcacgtttgaaacactctttttgcaggatctacaagtggatatttggaccactctgtgtccttcattcgaaacgggtatatcttcacacgacatctagacagaagctttctcagaaaattctttgggatgattgagtggaactcacagagctgaacattccttgcgatgtagcagtttagaaacacactttctgcagaatctgcaagtgcatatttggacctctctgaggaattcgttggaaacgggataatttcagctgactaaacagaagcattctcagaaccttcttcgtgatgtctgcattcaactcacagtgtggaacctttctttgatagttcaggtttgaaacactctttttgtagaaactgcaaggggataattgcacttctttgaggcctaccgtagtaaaggaaataacttcctatagaaagaagacagaagcattctcagaaccctcttcgtgatgtttgcattcaactcacagtgctgaacctttctttgatagttcagctttgaaacactcttcttgtagaaactgcaagtggatatttggtcctctctgaggatttcgttggaaacgggataaaccgcacagaactaaacagaagaattctcagagccctcttcgtgatgtttgcattcaactcacagtgctgaacctttctttgatagtgcagctttgaaacactctttttgtagaaactgcaagtggatgtttggtcctctctgaggatttcgttggaaacgggataaaccgcacagaactaaaacagaagcattgtcagaaacttctttgtgatgattgcattcaactcacagagttgaaggttccttttcaaacagcagtttccaatcactctttctgtggaatctgcaagtggatatttgggcctctctgaggatttcgttggaaacgggataaaacgcacagaactaaaacagaagcattctcagaaacttctctgtgatgtttgtgttcaactcccagagtttcacgttgcttttcatagagtagttctgaaacatgcttttcgtagtgtctgcaagtggacatttggagcgctttcaggcctgtggtggaaaacgaattatggtcacataaaaactggagagaagccttctcagaaacttctctgtgatgattgcattcaactcacagagttgaaccctcctatggatagagcagtgttgaaactctctttttgtggaatctgcaagtggatatgtggacctctccgaagatgtctttggaaacgggaatatcttcacataaaaactaaacagaagcattctcagaaacttcttggtgatgtttgcattcaaatcccagagttgaaccttcctttggtagttcaggtttgaaacactctttttgtaggatctgcaagtggctatttggaccactctgtggccttcgttcgaaacgggtatatcttcgcataaaatctagacagaagcattctcagaaaatactttgtgatgattgagtttaaatcacagagctgaacattcctttggatggagcaggtttgagacacactttttgtagaatctacaagtggatatttggacctctctgaggatttcgttggaaacgggataactgcacctaactaaacggaagcattctcagaaactgctttgtgatgattgcattcacctcacagagttgaacattcctattgatagagcagtttggaaacactcttgttgtggaatgtgcaagtggagatttggagcgctttgaggcctatggtagtaaagggaatagcttcatagaaaaactagacagaatgcattctcagggaactttttggtgatgtttgtattcaactcccagagttgaactttcctttggaaagagcagctatgaaacactctttttctagaatctgcaagtggacgtttggagggctttgtggtttgtggtggaaaaggaaatatcttcacctaaatactagatagaagcattctcagaagcttctctgtgatgactgcattcaactcacggagttgaacactccttttgagagcgcagttttgaaactctctttctgtggcatccgcaaggggacatgtggacctctttgaagatttcgttggaaatggaatcatcttcacataaaaactatacagaagcagtctcagaatcttctttgtgatgtttgcattcaaatcccagagttgaactttcctttcaaagttcacgtttgaaacactctttttgcaggatctacaagtggatatttggaccactctgtgtccttcgttcgaaacgggtatatcttcacacgacatctagacagaagctttctcagaaaattctttgggatgattgagtggaactcacagagctgaacattccttgcgatgtagcagtttagaaacacactttctgcagaatctgcaagtgcatatttggacctctctgaggaattcgttggaaacgggataatttcagctgactaaacagaagcattctcagaaccttcttcgtgatgtctgcattcaactcacagtgtggaacctttctttgatagttcaggtttgaaacactctttttgtagaaactgcaaggggataattgcacttctttgaggcctaccgtagtaaaggaaataacttcctatagaaagaagacagaagcattctcagaaccctcttcgtgatgtttgcattcaactcacagtgctgaacctttctttgatagttcagctttgaaacactcttcttgtagaaactgcaagtggatatttggtcctctctgaggatttcgttggaaacgggataaaccgcacagaactaaacagaagaattctcagagccctcttcgtgatgtttgcattcaactcacagtgctgaacctttctttgatagtgcagctttgaaacactctttttgtagaaactgcaagtggatgtttggtcctctctgaggatttcgttggaaacgggataaaccgcacagaactaaaacagaagcattgtcagaaacttctttgtgatgattgcattcaactcacagagttgaaggttccttttcaaacagcagtttccaatcactctttctgtggaatctgcaagtggatatttgggcctctctgaggatttcgttggaaacgggataaaacgcacagaactaaaacagaagcattctcagaaacttctctgtgatgtttgtgttcaactcccagagtttcacgttgcttttcatagagtagttctgaaacatgcttttcgtagtgtctgcaagtggacatttggagcgctttcaggcctgtggtggaaaacgaattatggtcacataaaaactggagagaagccttctcagaaacttctctgtgatgattgcattcaactcacagagttgaaccctcctatggatagagcagtgttgaaactctctttttgtggaatctgcaagtggatatgtggacctctccgaagatgtctttggaaacgggaatatcttcacataaaaactaaacagaagcattctcagaaacttcttggtgatgtttgcattcaaatcccagagttgaaccttcctttgatagttcaggtttgaaacactctttctgtaggatctgcaagtggctatttggaccactctgtggccttcgttcgaaacgggtatatcttcgcataaaatctagacagaagcattctcagaaaatactttgtgatgattgagtttaaatcacagagctgaccattcctttggatggagcaggtttgagacacactttttgtagaatctacaagtggatatttggacctctctgaggatttcgttggaaacgggataactgcacctaactaaacggaagcattctcagaaactgctttgtgatgattgcattcacctcacagagttgaacattcctattgatagagcagtttggaaacactcttgttgtggaatgtgcaagtggagatttggagcgctttgaggcctatggtagtaaagggaatagcttcatagaaaaactagacagatgcattctcaggaaccttttggtgatgtttgtattcaactcccagagttgaactttcctttggaaagagcagctatgaaacactctttttctagaatctgcaagtggacgtttggagggctttgtggtttgtggtggaaaaggaaatatcttcacctaaatactagatagaagcattctcagaagcttctctgtgatgactgcattcaactcacggagttgaacactccttttgagagcgcagttttgaaactctctttctgtggcatctgcaaggggacatgtagacctctttgaagatttcgttggaaacggaatcatcttcacataaaaactatacagaagcagtctcagaatcttctttgtgatgtttgcattcaaatcccagagttgaactttcctttcaaagttcacgtttgaaacactctttttgcaggatctacaagtggatatttggaccactctgtgtccttcgttcgaaacgggtatatcttcacacgacatctagacagaagctttctcagaaaattctttgggatgattgagtggaactcacagagctgaacattccttgcgatgtagcagtttagaaacacactttctgcagaatctgcaagtgcatatttggacctctctgaggaattcgttggaaacgggataatttcagctgactaaacagaagcattctcagaaccttcttcgtgatgtctgcattcaactcacagtgtggaacctttctttgatagttcaggtttgaaacactctttttgtagaaactgcaaggggataattgcacttctttgaggcctaccgtagtaaaggaaataacttcctatagaaagaagacagaagcattctcagaaccctcttcgtgatgtttgcattcaactcacagtgctgaacctttctttgatagttcagctttgaaacactcttcttgtagaaactgcaagtggatatttggtcctctctgaggatttcgttggaaacgggataaaccgcacagaactaaacagaagaattctcagagccctcttcgtgatgtttgcattcaactcacagtgctgaacctttctttgatagtgcagctttgaaacactctttttgtagaaactgcaagtggatgtttggtcctctctgaggatttcgttggaaacgggataaaccgcacagaactaaaacagaagcattcacagaaaactcttggtgacgactgagtttaactcacagagctgaacattcctttggatggagcagtttcgaaacacaccatttgtagaatctgcaagtggatatttgggcctctctgaggatttcgttggaaacgggataaaacgcacagaactaaaacagaagcattctcagaaactactttgtgatgattgcattcaagtcacagagttgaacattccctttgacagagcagtttggaaactctctttgtgtagaatctgcaagtggagatatggaccgctttgaggcctatggtagtaaaggaaatagcttcatataaaagctagacagtagcattctcagaaacttctttgtgatgcttgcattcaactcacagagttgaactttcctttcgagagagaagctttgaaacactctttttccagaatctgcaagtggacatttggagggctttgaggcctgtggtggaaaaggaattatcttcccgtaaaagctagacagaagcattgtcagaaacttctttgtgatgattgcattcaactcacagagttgaaggttccttttcaaagagcagtttccaatcactctttctgtggaatctgcaagtggatgtttggacctctttgaagatttcgttggaaacgggagaatcttcacagaaaagctaaacagaagcattctcagaaacttctctgtgatgtttgtgttcaactcccagagtttcacgttgtttttcatagagtagttctgaaacatgcttttcgtagtgtctgcaagtggacatttggagcgctttcaggcctgtggtggaaaacgaattatggtcacataaaaactggagagaagccttctcagaaacttgtctgtgatgattgcattcaactcacagagttgaaccctcctatggatagagcagtgttgaaactctctttttgtggaatctgcaagtggatatgtggacctctccgaagatgtctttggaaacgggaatatcttcacataaaaactaaacagaagcattctcagaaacttcttggtgatgtttgcattcaaatcccagagttgaaccttcctttgatagttcaggtttgaaacactctttttgtaggatctgcaagtggctatttggaccactctgtggccttcgttcgaaacgggtatatcttcgcataaaatctagacagaagcattctcagaaaatactttgtgatgattgagtttaaatcacagagctgaacattcctttggatggagcaggtttgagacacactttttgtagaatctacaagtggatatttggacctctctgaggatttcgttggaaacgggataactgcacctaactaaacggaagcattctcagaaactgctttgtgatgattgcattcacctcacagagttgaacattcctattgatagagcagtttggaaacactcttgttgtggaatgtgcaagtggagatttggagcgctttgaggcctatggtagtaaagggaatagcttcatagaaaaactagacagatgcattctcaggaactttttggtgatgtttgtattcaactcccagagttgaactttcctttggaaagagcagctatgaaacactctttttctagaatctgcaagtggacgtttggagggctttgtggtttgtggtggaaaaggaaatatcttcacctaaatactagagagaagcattctcagaagcttctctgtgatgactgcattcaactcacggggttgaacactccttttgggagcgcagttttgaaactctctttctgtggcatctgcaaggggacatgtagacctctttgaagatttcgttggaaacggaatcatcttcacataaaaactatacagaagcagtctcagaatcttctttgtgatgtttgcattcaaatcccagagttgaactttcctttcaaagttcacgtttgaaacactctttttgcaggatctacaagtggatatttggaccactctgagtccttcgttcgaaacgggtataccttcacatgacatctagacagaagctttctcagaaaattctttgggatgattgagtggaactcacagagctgaacattccttgcgatggagcagtttagaaacacactttctgcagaatctgcaagtgcatatttggacctctctgaggaattcgttggaaacgggataatttcagctgactaaacagaagcattctcagaaccttcttcgtgatgtctgcattcaactcacagtgtggaacctttctttgatagttcaggtttgaaacactctttttgtagaaactgcaaggggataattgcacttctttgaggcctaccgtagtaaaggaaataacttcctatagaaagaagacagaagcattcttcagaaccctcttcgtgatgtttgcattcaactcacagtgctgaacctttctttgatagttcagctttgaaacactcttcttgtagaaactgcaagtggatatttggtcctctctgaggatttcgttggaaacgggataaaccgcacagaactaaacagaagaattctcagagccctcttcgtgatgtttgcattcaactcacagtgctgaacctttctttgatagtgcagctttgaaacactctttttgtagaaactgcaagtggatgtttggtcctctctgaggatttcgttggaaacgggataaaccgcacagaactaaaacagaagcattgtcagaaacttctttgtgatgattgcattcaactcacagagttgaaggttccttttcaaacagcagtttccaatcactctttctgtggaatctgcaagtggatatttgggcctctctgaggatttcgttggaaacgggataaaacgcacagaactaaaacagaagcattctcagaaacttctctgtgatgtttgtgttcaactcccagagtttcacgttgcttttcatagagtagttctgaaacatgcttttcgtagtgtctgcaagtggacatttggagcgctttcaggcctgtggtggaaaacgaattatggtcacataaaaactggagagaagccttctcagaaacttctctgtgatgattgcattcaactcacagagttgaaccctcctatggatagagcagtgttgaaactctctttttgtggaatctgcaagtggatatgtggacctctccgaagatgtctttggaaacgggaatatcttcacataaaaactaaacagaagcattctcagaaacttcttggtgatgtttgcattcaaatcccagagttgaaccttcctttgatagttcaggtttgaaacactctttctgtaggatctgcaagtggctatttggaccactctgtggccttcgttcgaaacgggtatatcttcgcataaaatctagacagaagcattctcagaaaatactttgtgatgattgagtttaaatcacagagctgaccattcctttggatggagcaggtttgagacacactttttgtagaatctacaagtggatatttggacctctctgaggatttcgttggaaacgggataactgcacctaactaaacggaagcattctcagaaactgctttgtgatgattgcattcacctcacagagttgaacattcctattgatagagcagtttggaaacactcttgttgtggaatgtgcaagtggagatttggagcgctttgaggcctatggtagtaaagggaatagcttcatagaaaaactagacagaagcattctcagaaacttctctgtgatgtttgtgttcaactcccagagtttcacattgcttctcatagagtagttctgaaacatgcttttcgtagtatctgcaagtggacatttggagcgctttcaggcctgtggtggaaaacgaattatggtcacataaaaactggagagaagccttctcagaaacttctctgtgatgattgcattcaactcacagagttgaaccctcctatgcatagagcagtgttgaaactctctttttgtggaatctgcaagtggatatgtggacctctccgaagatgtctttggaaacgggaatatcttcacataaaaactaaacagaagcattctcagaaacttcttggtgatgtttgcattcaaatcccagagttgaaccttcctttgatagttcaggtttgaaacactctttttgtaggatctgcaagtggatatttggaccactctgtggccttcgttcgaaacgggtacatcttcgcataaaatctagacagaagcattctcagaaaatattttgtgatgattgagttgaactcacagagctgaacattcctttggatggagcaggtttgagacacactttttgtagaaactacaagtggatatttggacctctctgaggatttcgttggaaacgggataactgcacctaactaaacggaagcattctcagaaactgctttgtgacgattgcattcacctcacagagttgaacattcctattgatagagcaggttggaaacactcttgttgtggaatgtgcaagtggagatttggagcgctttgaggcctatggtagtaaagggaatagcttcatagaaaaactagacagatgcattctcaggaactttttggtgatgtttgtattcaactcccagagttgaactttcctttggaaagagcagctatgaaacactctttttctaggatctgcaagtggacgtttggagggctttgtggtttgtggtggaaaaggaaatatcttcacctaaatactagagagaagcattctcagaagcttctctgtgatgactgcattcaactcacggagttgaacactccttttgagagcgcagttttgaaactctctttctgtggcatccgcaaggggacatgtagacctctttgaagatttcgttggaaacggaatcatcttcacataaaaactatacagaagcagtctcagaatcttctttgtgatgtttgcattcaaatcccagagttgaactttcctttcaaagttcacgtttgaaacactctttttgcaggatctacaagtggatatttggaccactctgtgtccttcgttcgaaacgggtatatcttcacatgacatctagacagaagctttctcagaaaattctttggatgattgagtggaactcacagagctgaacattccttgcgatgtagcagtttagaaacacactttctgcagaatctgcaagtgcatatttggacctctctgaggaattcgttggaaacgggataatttcagctgactaaacagaagcattctcagaaccttcttcgtgatgtctgcattcaactcacagtgtggaacctttctttgatagttcaggtttgaaacactctttttgtagaaactgcaaggggataattgcacttctttgagggctaaccgtagtaaaggagataacttcctataaaaagaagacagaagcattctcagaaccctcttcgtgatgtttgcattcaactcacagtgctgaacctttctttgatagttcagctttgaaacactcttcttgtagaaactgcaagtggatatttggtcctctctgaggatttcgttggaaacgggataaaccgcacagaactaaacagaagaattctcagagccctcttcgtgatgtttgcattcaactcacagtgctgaacctttctttgatagtgcagctttgaaacactctttttgtagaaactgcaagtggatgtttggtcctctctgaggatttcgttggaaacgggataaaccgcacagaactaaaacagaagcattgtcagaaacttctttgtgatgattgcattcaactcacagagttgaaggttccttttcaaacagcagtttccaatcactctttctgtggaatctgcaagtggatatttgggcctctctgaggatttcgttggaaacgggataaaacgcacagaactaaaacagaagcattctcagaaacttctctgtgatgtttgtgttcaactcccagagtttcacgttgcttttcatagagtagttctgaaacatgcttttcgtagtgtctgcaagtggacatttggagcgctttcaggcctgtggtggaaaacgaattatggtcacataaaaactggagagaagccttctcagaaacttctctgtgatgattgcattcaactcacagagttgaaccctcctatggatagagcagtgttgaaactctctttttgtggaatctgcaagtggatatgtggacctctccgaagatgtctttggaaacgggaatatcttcacataaaaactaaacagaagcattctcagaaacttcttggtgatgtttgcattcaaatcccagagttgaaccttcctttgatagttcaggtttgaaacactctttttgtaggatctgcaagtggctatttggaccactctgtggccttcgttcgaaacgggtatatcttcgcataaaatctagacagaagcattctcagaaaatactttgtgatgattgagtttaaatcacagagctgaacattcctttggatggagcaggtttgagacacactttttgtagaatctacaagtggatatttggacctctcagaggatttcgttggaaacgggataactgcacctaactaaacggaagcattctcagaaactgctttgtgatgatagcattcacctcacagagttgaacattcctattgatagagcagtttggaaacactcttgttgtggaatgtgcaagtggagatttggagctctttgaggcctatggtagtaaagggaatagcttcatagaaaaactagacagatgcattctcaggaactttttggtgatgtttgtattcaactcccagagttgaactttcctttggaaagagcagctatgaaacactctttttctagaatctgcaagtggacgtttggagggctttgtggtttgtggtggaaaaggaaatatcttcacctaaatactagatagaagcattctcagaagcttctctgtgatgactgcattcaactcacggagttgaacactccttttgagagcgcagttttgaaactctctttctgtggcatccgcaaggggacatgtagacctctttgaagatttcgttggaaacggaatcatcttcacataaaaactatacagaagcagtctcagaatcttctttgtggtgtttgcattcaaatcccagagttgaactttcctttcaaagttcacgtttgaaacactctttttgcaggatctacaagtggatatttggaccactctgtgtccttcgttcgaaacgggtatatcttcacatgacatctagacagaagctttctcagaaaattctttgggatgattgagtggaactcacagagctgaacattccttgcgatgtagcagtttagaaacacactttctgcagaatctgcaagtgcatatttggacctctctgaggaattcgttggaaacgggataatttcagctgactaaacagaagcattctcagaaccttcttcgtgatgtctgcattcaactcacagtgtggaacctttctttgatagttcaggtttgaaacactctttttgtagaaactgcaaggggataattgcacttctttgaggcctaccgtagtaaaggaaataacttcctatagaaagaagacagaagcattctcagaaccctcttcgtgatgtttgcattcaactcacagtgctgaacctttctttgatagttcagctttgaaacactcttcttgtagaaactgcaagtggatatttggtcctctctgaggatttcgttggaaacgggataaaccgcacagaactaaacagaagaattctcagagccctcttcgtgatgtttgcattcaactcacagtgctgaacctttctttgatagtgcagctttgaaacactctttttgtagaaactgcaagtggatgtttggtcctctctgaggatttcgttggaaacgggataaaccgcacagaactaaaacagaagcattgtcagaaacttctttgtgatgattgcattcaactcacagagttgaaggttccttttcaaacagcagtttccaatcactctttctgtggaatctgcaagtggatatttgggcctctctgaggatttcgttggaaacgggataaaacgcacagaactaaaacagaagcattctcagaaacttctctgtgatgtttgtgttcaactcccagagtttcacgttgcttttcatagagtagttctgaaacatgcttttcgtagtgtctgcaagtggacatttggagcgctttcaggcctgtggtggaaaacgaattatggtcacataaaaactggagagaagccttctcagaaacttctctgtgatgattgcattcaactcacagagttgaaccctcctatggatagagcagtgttgaaactctctttttgtggaacctgcaagtggatatgtggacctctccgaagatgtctttggaaacgggaatatcttcacataaaaactaaacagaagcattctcagaaacttcttggtgatgtttgcattcaaatcccagagttgaaccttcctttgatagttcaggtttgaaacactctttctgtaggatctgcaagtggctatttggaccactctgtggccttcgttcgaaacgggtatatcttcgcataaaatctagacagaaagcattctcagaaaatactttgtgatgattgagtttaaatcacagagctgaacattcctttggatggagcaggtttgagacacactttttgtagaatctacaagtggatatttggacctctctgaggatttcgttggaaacgggataactgcacctaactaaacggaagcattctcagaaactgctttgtgatgattgcattcacctcacagagttgaacattcctattgatagagcagtttggaaacactcttgttgtggaatgtgcaagtggagatttggagcgctttgaggcctatgatagtaaagggaatagcttcatagaaaaactagacagatgcattctcaggaactttttggtgatgtttgtattcaactcccagagttgaactttcctttggaaagagcagctatgaaacactctttttctagaatctgcaagtggacgtttggagggctttgtggtttgtggtggaaaaggaaatatcttcaccgaaatactagagagaagcattctcagaagcttctctgtgatgactgcattcaactcacggagttgaacactccttttgagagcgcagttttgaaactctctttctgtggcatctgcaaggggacatgtagacctctttgaagatttcgttggaaacggaatcatcttcacatcaaaactatacagaagcagtctcagaatcttctttgtgatgtttgcattcaaatcccagagttgaactttcctttcaaagttcacgtttgaaacactctttttgcaggatctacaagtggatatttggaccactctgcgtccttcgttcgaaacgggtatatcttcacatgacatctagacagaagctttctcagaaaattctttgggatgattgagtggaactcacagagctgaacattccttgcgatgtagcagtttagaaacacactttctgcagtatcttcaagtgcatatttggacctctgtgaggaattcgttggaaacgggataatttcagctgactaaacagaagcattctcagaaccttcttcgtgatgtctgcattcaactcacagtgtggaacctttctttgatagttcaggtttgaaacactctttttgtagaaactgcaaggggataattgcacttctttgaggcctaccgtagtaaaggaaataacttcctatagaaagaagacagaagaattctcagagccctcttcgtgatgtttgcattcaactcaaagtgctgaacctttctttgatagtgcagctttgaaacactctttttgtagaaactgcaagtggatatttggtcctctctgaggatttcgttggaaacgggataaaccgcacagaactaaaacagaagcattcacagaaaactcttgttgacgactgagtttaactcacagagctgaacattcctttggatggagcagtttcgaaacacactatttgtagaatctgcaagtggatatttgggcctctctgaggatttcgttggaaacgggataaaacgcacagaactaaaacagaagcattctcagaaactactttctgattattgcattcaagtcacagagttgaacattccctttgacagagcagtttggaaactctctttgtgtagaatctgcaagtggagatatggaccgctttgaggcctatggtagtaaaggaaatagcttcatataaaagctagacagtagcattctcagaaacttctttgtgatgcttgcattcaactcacagagttgaactttcctttcgagagagaagctttgaaacactctttttccagaatctgcaagtggacatttggagggctttgaggcctgtggtggaaaaggaattatcttcccgtaaaagctagatagaagcattgtcagaaacttctttgtgatgattgcattcaactcacagagttgaaggttccttttcaaagagcagtttccaatcactctttctgtggaatctgcaagtggatatttggacctattttgaagatttcgttggaaacgggagaatcttcacaggaaagctaaacagaagcattctcagaaacttctctgtgatgtttgtgttcaactcccagagtttcacattgcttttcatagagtagttctgaaacatgcttttcgtagtgtctacaagtggacatttggagcgctttcaggcctgtggtggaaaacgaattatggtcacataaaaactggagagaagccttctcagaaacttctctgtgatgattgcattcaactcacagagttgaaccctcctatggatagagcagtgttgaaactctctttttgtggaatctgcaagtggatatgtggacctctccgaagatgtctttggaaacgggaatatcttcacataaaaactaaacagaagcattctcagaaacttcttggtgatgtttgcattcaaatcccagagttgaaccttcctttgatagttcaggtttgaaacactctttttgtaggatctgcaagtggatatttggaccactctgtggccttcattcgaaacgggtatatcttcgcataaaatctagacagaagcattctcagaaaatactttgtgatgattgagtttaactcacagagctgaacattcctttggatggagcaggtttgagacacaccttttgtagaatctacaagtggatatttggacctctctgaggatttcgttggaaacgggataactgcacctaactaaacggaagcattctcagaaactgctttgtgatgattgcattcacctcacagagttgaacattcctattgatagagcagtttggaaacactcttgttgtggaatgtgcaagtggagatttggagcgctttgaggcctatggtagtaaagggaatagcttcatagaaaaactagacagatgcattctcaggaactttttggtgatgtttgtattcaactcccagagttgaactttcctttggaaagagcagctatgaaacactctttttctagaatctgcaagtggacgtttggagggctttgtggtttgtggtggaaaaggaaatatcttcacctaaatactagatagaagcattctcagaagcttctctgtgatgactgcattcaactcacggagttgaacactccttttgagagcgcagttttgaaactctctttctgtggcatccgcaaggggacatgtggacctctttgaagatttcgttggaaacggaatcatcttcacataaaaactatacagaagcagtctcagaatcttctttgtgatgtttgcattcaaatccccgagttgaactttcctttcaaagttcacgtttgaaacactctttttgcaggatctacaagtggatatttggaccactctgtgtccttcgttcgaaacgggtatatcttcacatgacatctagacagaagctttctcagaaaattctttaggatgattgagttgaactcacagagctgagcattccttgcgatgtagcagtttagaaacacactttctgcagaatctgcaagtgcatatttggacctctgtgaggaattcgttggaaacgggataatttcagctgactaaacagaagcattctcagaaccttcttcgtgatgtctgcattcaactcacagtgtggaacctttctttgatagttcaggtttgaaacactctttttgtagaaactgcaaggggataattgcactctttgaggagtaccgtagtaaaggaaataacttcctataaaaagaagacagaagcattctcagaaccctcttcgtgatgtttgcattcaactcacagtgctgaacctttctttgatagttcagctttgaaacactcttcttgtagaaactgcaagtggatatttggtcttctctgaggatttcgttggaaacgggataaactgcacagaactaaacagaagcattctcagaaccttcttcgtgatgtttgcattcaactcacagtgttgaacctttctttgatagttcaggtttgaaacggtctttctgtagaaactgcaagtagatatttggacctctctgaggatttcgttggaaacgggataacccgcacagaactaaaacagaagcattcacagaaaactcttggtgacgactgagtttaactcacagagctgaacattcctttggatggagcagtttcgaaacacactatttgtagaatgtgcaagtggatatttgggcctctctgaggatttcgttggaaacgggataaaccgcacagaactaaacagaagcattctcagaaactactttgtgatgattgcattcaagtcacagacttgaacattccctttgacagagcagtttggaaactctctttgtgtagaatctgcaagtggagatatggaccgctttgaggcctatggtagtaaaggaaatagcttcatataaaagctagacagtagcattctcagaaacttctttgtgatgcttgcattcaactcacagagttgaactttcctttcgagagagaagctttgaaaaactcttttccagaatctgcaagtggacatttggagggcattgaggcctgtggtggaaaaggaattatcttcccgtaaaagctagacagaagcattgtcagaaacttctttgtgatgattgcattcaagtcacagagttgaaggttccttttcaaagagcagtttccaatcactctttctgtggaatctgcaagtggatatttggacctctttgaagatttcgttggaaacgggagaatcttcacagaaatgctaaacagaagcattctcagaaacttctctgtgatgtttgtgttcaactcccagagtttcacgttgcttttcatagagtagttctgaaacatgcttttcgtagtgtctgcaagtggacatttggagcgctttcaggcctgtggtggaaaacgaattatggtcacataaaaactggagagaagccttctcagaaacttctctgtgatgattgcattcaactcacagagttgaaccctcctatggatagagcagtgttgaaactctctttttgtggaatctgcaagtggatatgtggacctctccgaagatgtctttggaaacgggaatatcttcacataaaaactaaacagaagcattctcagaaacttcttggtgatgtttgcattcaaatcccagagttgaaccttcctttgatagttcaggtttgaaacactctttctgtaggatctgcaagtggctatttggaccactctgtggccttcgttcgaaacgggtatatcttcgcataaaatctagacagaagcattctcagaaaatactttgtgatgattgagtttaaatcacagagctgaccattcctttggatggagcaggtttgagacacactttttgtagaatctacaagtggatatttggacctctctgaggatttcgttggaaacgggataactgcacctaactaaacggaagcattctcagaaactgctttgtgatgattgcattcacctcacagagttgaacattcctattgatagagcagtttggaaacactcttgttgtggaatgtgcaagtggagatttggagcgctttgaggcctgtggtagtaaagggaatagcttcatagaaaaactagacagatgcattctcaggaaccttttggtgatgtttgtattcaactcccagagttgaactttcctttggaaagagcagctatgaaacactctttttctagaatctgcaagtggacgtttggagggctttgtggtttgtggtggaaaaggaaatatcttcacctaaatactagatagaagcattctcagaagcttctctgtgatgactgcattcaactcacggagttgaacactccttttgagagcgcagttttgaaactctctttctgtggcatctgcaaggggacatgtagacctctttgaagatttcgttggaaacggaatcatcttcacataaaaactatacagaagcagtctcagaatcttctttgtgatgtttgcattcaaatcccagagttgaactttcctttcaaagttcacgtttgaaacactctttttgcaggatctacaagtggatatttggaccactctgtgtccttcgttcgaaacgggtatatcttcacaggacatctagacagaagctttctcagaaaattgtttgggatgattgatttgaactcacagagctgagcattccttgcgatgtagcagtttagaaacacactttctgcagaatctgcaagtgcatatttggacctctctgaggaattcgttggaaacgggataatttcagctgactaaacagaagcattctcagaaccttcttcgtgatgtctgcattcaactcacagtgtggaacctttctttgatagttcaggtttgaaacactctttttgtagaaactgcaaggggataattgcactctttgaggagtaccgtagtaaaggaaataacttcctataaaaagaagacagaagcattctcagaaccctcttcgtgatgtttgcattcaactcacagtgctgaacctttctttgatagttcagctttgaaacactctttttgtagaaactgcaaatggatatttggtcctctctgaggatttcgttggaaaagggataaaacgcacagaactaaacagaagcattcacagaaaactcttggtgacgactgagtttaactcacagagctgaacattcctttggatggagcagtttcaaaacacactatttgtagaatctgcaagtggatatgtgggcctctctgaggatttcattggaaacgggataaaccgcacagaactaaaacagaagcattctcagaaactactttgtgatgattgcattcaagtcacagagttgaacattccctttgacagagcagtttggaaactctctttgtgtagaatctgcaagtggagatatggaccgctttgaggcctatggtagtaaaggaaatagcttcatataaaagctagacagtagcattctcagaaacttctttgtgatgcttgcattcaactcacagagttgaactttcctttcgagagagaagctttgaaacactctttttccagaatctgcaagtggacatttggagggctttgaggcctgtggtggaaaaggaattatcttcccgtaaaagctagatagaagcattgtcagaaacttctttgtgatgattgcattcaactcacagagttgaaggttccttttcaaagagcagtttccaatcactctttctgtggaatctgcaagtggatatttggatctctttgaagatttcgttggaaacgggagaatcttcacagaaaagctaaacagaagcattctcagaaacttctctgtgatgtttgtgttcaactcccagagtttcacattgcttttcatagagtagttctgaaacatgcttttcgtagtgtctacaagtggacatttggagcgctttcaggcctgtggtggaaaacgaattatggtcacataaaaactggagagaagccttctcagaaacttctctgtgatgattgcattcaactcacagatttgaaccctcctatggatagagcagtgttgaaactctctttttgtggaatctgcaagtggatatgtggacctctccgaagatgtctttggaaacgggaatatcttcacataaaaactaaacagaagcattctcagaaacttcttggtgatgtttgcattcaaatcccagagttgaaccttcctttgatagttcaggtttgaaacactctttctgtaggatctgcaagtggctatttggaccactctgtggccttcgttcgaaacgggtatatcttcgcataaaatctagacagaagcattctcagaaaatactttgtgatgattgagtttaaatcacagagctgaccattcctttggatggagcaggtttgagacacactttttgtagaatctacaagtggatatttggacctctctgaggatttcgttggaaacgggataactgcacctaactaaacggaagcattctcagaaactgctttgtgatgattgcattcacctcacagcagttgaacattcctattgatagagcagtttggaaacactcttgttgtggaatgtgcaagtggagatttggagcgctttgaggcctatggtagtaaagggaatagcttcatagaaaaactagacagatgcattctcaggaactttttggtgatgtttgtattcaactcccagagttgaactttcctttggaaagagcagctatgagacactgtttctctagaatctgcaagtggacgtttggagggctttgtggtttgtggtggaaaggaaatatcttcacctaaatactagatagaagcattctcagaagcttctctgtgatgactgcattcaactcacggagttgaacactccttttgagagcgcagttttgaaactctctttctgtggcatctgcaaggggacatgtagacctctttgaagatttcgttggaaacggaatcatcttcacataaaaactatacagaagcagtctcagaatcttctttgtgatgtttgcattcaaatccccgagttgaactttcctttcaaagttcacgtttgaaacactctttttgcaggatctacaagtggatatttggaccactctgtgtccttcgttcgaaacgggtatatcttcacatgacatctagacagaagctttctcagaaaattctttgggatgattgagttgaactcacagagctgagcattccttgcgatgtagcagtttagaaacacactttctgcagaatctgcaagtgcatatttggacctctgtgaggaattcgttggaaacgggataatttcagctgactaaacagaagcattctcagaaccttcttcgtgatgtctgcattcaactcacagtgtggaacctttctttgatagttcaggtttgaaacactctttttgtagaaactgcaaggggataattgcactctttgaggagtaccgtagtaaaggaaataacttcctataaaaagaagacagaagcattctcagaaccctcttcgtgatgtttgcattcaactcacagtgctgaacctttctttgatagttcagctttgaaacactctttttgtagaaactgcaagtggatatttggtcctctctgagcatttcgttggaaacgggataaactgcacagaactaaacagaagcattctcagaaccttcttcgtgatgtttgcattcaactcacagtgttgaacctttctttgatagttcaggtttgaaacggtctttctgcagaaactgcaagtagatatttggaccgctctgaggatttcgttggaaacgggataaacctcacagaactaaaacagaagcattcacagaaaactcttggtgacgactgagtttaactcacagagctgaacattcctttggatggagcagtttcgaaacacactatttgtagaatgtgcaagtggatatttaggcctctctgaggatttcgttggaaacgggataaaccgcacagaactaaacagaagcattctcagaaactactttgtgatgattgcattcaagtcacagagttgaacattccctttgacagagcagtttggaaactctctttgtgtagaatctgcaagtggagatatggaccgctttgaggcctatggtagtaaaggaaatagcttcatataaaagctagacagtagcattctcagaaacttctttgtgatgcttgcattcaactcacagagttgaactttcctttcgagagagaagctttgaaacactctttttccagaatctgcaagtggacatttggagggctttgaggcctgtggtggaaaaggaattatcttcccgtaaaagctagatagaaagcattgtcagaaacttctttgtgatgattgcattcaactcacagagttgaaggttccttttcaaagagcagtttccaatcactctttctgtggaatctgcaagtggatattcggacctattttgaagatttcgttggaaacgggagaatcttcacaggaaagctaaacagaagcattctcagaaacttctctgtgatgtttgtgttcaactcccagagtttcacattgcttttcatagagtagttttgaaacatgcttttcgtagtgtctgcaagtggacatttggagcgctttcaggcctgtggtggaaaacgaattatggtcacataaaaactggagagaagccttctcagaaacttctctgtgatgattgcattcaactcacagagttgaaccctcctatggatagagcagtgttgaaactctctttttgtggaatctgcaagtggatatgtggacctctccgaagatgtctttggaaacgggaatatcttcacataaaaactaaacagaagcattctcagaaacttcttggtgatgtttgcattcaaatcccagagttgaaccttcctttgatagttcaggtttgaaacactctttctgtaggatctgcaagtggctatttggaccactctgtggccttcgttcgaaacgggtatatcttcgcataaaatctagacagaagcattctcagaaaatactttgtgatgattgagtttaaatcacagagctgaccattcctttggatggagcaggtttgagacacactttttgtagaatctacaagtggatatttggacctctctgaggatttcgttggaaacgggataactgcacctaactaaacggaagcattctcagaaactgctttgtgatgattgcattcacctcacagagttgaacattcctattgatagagcagtttggaaacactcttgttgtggaatgtgcaagtggagatttggaagcgctttgaggcctgtggtagtaaagggaatagcttcatagaaaaactagacagatgcattctcaggaaccttttggtgatgtttgtattcaactcccagagttgaactttcctttggaaagagcagctatgaaacactctttttctagaatctgcaagtggacgtttggagggctttgtggtttgtggtggaaaaggaaatatcttcacctaaatactagatagaagcattctcagaagcttctctgtgatgactgcattcaactcacggagttgaacactccttttgagagcgcagttttgaaactctctttctgtggcatctgcaaggggacatgtagacctctttgaagatttcgttggaaacggaatcatcttcacataaaaactatacagaagcagtctcagaatcttctttgtgatgtttgcattcaaatcccagagttgaactttcctttcaaagttcacgtttgaaacactctttttgcaggatctacaagtggatatttggaccactctgtgtccttcgttcgaaacgggtatatcttcacacgacatctagacagaagctttctcagaaaattctttgggatgattgagtggaactcacagagctgaacattccttgcgatgtagcagtttagaaacacactttctgcagaatctgcaagtgcatatttggacctctctgaggaattcgttggaaacgggataatttcagctgactaaacagaagcattctcagaaccttcttcgtgatgtctgcattcaactcacagtgtggaacctttctttgatagttcaggtttgaaacactctttttgtagaaactgcaaggggataattgcacttctttgaggcctaccgtagtaaaggaaataacttcctatagaaagaagacagaagcattctcagaaccctcttcgtgatgtttgcattcaactcacagtgctgaacctttctttgatagttcagctttgaaacactcttcttgtagaaactgcaagtggatatttggtcctctctgaggatttcgttggaaacgggataaaccgcacagaactaaacaggaagaattctcagagccctcttcgtgatgtttgcattcaactcacagtgctgaacctttctttgatagtgcagctttgaaacactctttttgtagaaactgcaagtggatgtttggtcctctctgaggatttcgttggaaacgggataaaccgcacagaactaaaacagaagcattgtcagaaacttctttgtgatgattgcattcaactcacagagttgaaggttccttttcaaacagcagtttccaatcactctttctgtggaatctgcaagtggatatttgggcctctctgaggatttcgttggaaacgggataaaacgcacagaactaaaacagaagcattctcagaaacttctctgtgatgtttgtgttcaactcccagagtttcacgttgcttttcatagagtagttctgaaacatgcttttcgtagtgtctgcaagtggacatttggagcgctttcaggcctgtggtggaaaacgaattatggtcacataaaaactggagagaagccttctcagaaacttctctgtgatgattgcattcaactcacagagttgaaccctcctatggatagagcagtgttgaaactctctttttgtggaatctgcaagtggatatgtggacctctttgaagatgtctttggaaacgggaatatcttcacataaaaactaaacagaagcattctcagaaacttcttggtgatgtttgcattcaaatcccagagttgaaccttcctttgatagttcaggtttgaaacactctttttgtaggatctgcaagtggctatttggaccactctgtggccttcgttcgaaacgggtatatcttcgcataaaatctagacagaagcattctcagaaaatactttgtgacgattgagtttaaatcacagagctgaacattcctttggatggagcaggtttgagacacactttttgtagaatctacaagtggatatttggacctctctgaggatttcgttggaaacgggataactgcacctaactaaacggaagcattctcagaaactgctttgtgatgattgcattcacctcacagagttgaacattcctattgatagagcagtttggaaacactcttgttgtggaatgtgcaagtggagatttggagcgctttgaggcctatggtagtaaagggaatagcttcatagaaaaactagacagatgcattctcaggaactttttggtgatgtttgtattcaactcccagagttgaactttcctttggaaagagcagctatgaaacactctttttctagaatctgcaagtggacgtttggagggctttgtggtttgtggtggaaaaggaaatatcttcacctaaatactagatagaagcattctcagaagcttctctgtgatgactgcattcaactcacggagttgaacactccttttgagagcgcagttttgaaaatctctttctgtggcatctgcaaggggacatgtagacctctttgaagatttcgttggaaacggaatcatcttcacataaaaactatacagaagcagtctcagaatcttctttgtgatgtttgcattcaaatcccagagttgaactttcctttcaaagttcacgtttgaaacactctttttgcaggatctacaagtggatatttggaccactctgtgtccttcgtacgaaacgggtatatcttcacatgacatctagacagaagctttctcagaaaattctttgggatgattgagtggaactcacagagctgaacattccttgcgatgtagcagtttagaaacacactttctgcagaatctgcaagtgcatatttggacctctctgaggaattcgttggaaacgggataatttcagctgactaaacagaagcattctcagaaccttcttcgtgatgtctgcattcaactcacagtgtggaacctttctttgatagttcaggtttgaaacactctttttgtagaaactgcaaggggataattgcacttctttgaggcctaccgtagtaaaggaaataacttcctatagaaagaagacagaagcattctcagaaccctcttcgtgatgtttgcattcaactcacagtgctgaacctttctttgatagttcagctttgaaacactcttcttgtagaaactgcaagtggatatttggtcctctctgaggatttcgttggaaacgggataaaccgcacagaactaaacagaagaattctcagagccctcttcgtgatgtttgcattcaactcacagtgctgaacctttctttgatagtgcagctttgaaacactctttttgtagaaactgcaagtggatgtttggtcctctctgaggatttcgttggaaacgggataaaccgcacagaactaaaacagaagcattgtcagaaacttctttgtgatgattgcattcaactcacagagttgaaggttccttttcaaacagcagtttccaatcactctttctgtggaatctgcaagtggatatttgggcctctctgaggatttcgttggaaacgggataaaacgcacagaactaaaacagaagcattctcagaaacttctctgtgatgtttgtgttcaactcccagagtttcacgttgcttttcatagagtagttctgaaacatgcttttcgtagtgtctgcaagtggacatttggagcgctttcaggcctgtggtggaaaacgaattatggtcacataaaaactggagagaagccttctcagaaacttctctgtgatgattgcattcaactcacagagttgaaccctcctatggatagagcagtgttgaaactctctttttgtggaatctgcaagtggatatgtggacctctccgaagatgtctttggaaacgggaatatcttcacataaaaactaaacagaagcattctcagaaacttcttggtgatgtttgcattcaaatcccagagttgaaccttcctttgatagttcaggtttgaaacactctttctgtaggatctgcaagtggctatttggaccactctgtggccttcgttcgaaacgggtatatcttcgcataaaatctagacagaagcattctcagaaaatactttgtgatgattgagtttaaatcacagagctgaccattcctttggatggagcaggtttgagacacactttttgtagaatctacaagtggatatttggacctctctgaggatttcgttggaaacgggataactgcacctaactaaacggaagcattctcagaaactgctttgtgatgattgcattcacctcacagagttgaacattcctattgatagagcagtttggaaacactcttgttgtggaatgtgcaagtggagatttggagcgctttgaggcctatggtagtaaagggaatagcttcatagaaaaactagacagatgcattttcaggaaccttttggtgatgtttgtattcaactcccagagttgaactttcctttggaaagagcagctatgaaacactctttttctagaatctgcaagtggacgtttggagggctttgtggtttgtggtggaaaaggaaatatcttcacctaaatactagatagaagcattctcataagcttctctgtgatgactgcattcaactcacggagttgaacactccttttgagagcgcagttttgaaactctctttctgtggcatctgcaaggggacatgtagacctctttgaagatttcgttggaaacggaatcatcttcacataaaaactatacagaagcagtctcagaatcttctttgtgatgtttgcattcaaatcccagagatgaactttcctttcaaagttcacgtttgaaacactctttttgcaggatctacaagtggatatttggaccactctgtgtccttccttcgaaacgggcatatcttcacatgacatctagacagaagctttctcagaaaattctttgggatgattgagttgaactcacagagctgaacattccttgcgatgtagcagtttagaaacacactttctgcagaatctgcaagtgcatatttagacctctctgaggaattcgttggaaacgggataatttcagctgactaaacagaagcattctcagaaccttcttcgtgatgtctccattcaactcacagtgtggaacctttctttgatagttcaggtttgaaacactctttttgtagaaactgccaggggatgattgcacttctttgaggcctaccgtagcaaaagaaataacttcctataaaaagaagacagaagcattctcagaaccttcttcgtgatgtttgcattcaactcacactgctgaacctttctttgatagttcagctttgaaacactctttttgtagaaactgcaagtggatatttggtcctctctgaggatttcgttggaaacgggataaaccgcgcagaactaaacagaagcattctcagaaccttcttcgtgatgtttgcattcaactcacagtgttgaacctttctttgatagttcaggttggatacggtctttctgtagaaactgcaagtagatatttggacctctctgaggatttcgttggaaacgggataaaccgcacagaactaaaacagaagcattcacagaaaactcttggtgacgactgagtttaactcacagagctgaacattcctttggatggagcagtttcaaaacacactatttgtagaatctgcaagtggatatgtgggcctctctgaggatttcgttggaaacgggataaaccgcacagaactaaaacagaagcattctcagaaactactttgttatgattgcattcaagtcacagagttgaacattccctttgacagagcagtttggaaactctctttgtgtagaatctgcaagtggagatatggaccactttgaggcctatggtagtaaaggaaatagcttcatataaaagctagacagtagcattctcagaaacttctttgtgatgcttgcattcaactcacagagttgaactttcctttcgagagagaagctttgaaacactctttttccagaatctgcaagtggacatttggaaggctttgaggcctgtggtggaaaaggaattatcttcccgtaaaagctagatagaagcattgtcagaaacttctttgtgatgattgcattcaactcacagagttgaaggttccttttcaaagagcagtttccaatcactctttctgtggaatctgcaagtggatatttggacctctttgaagatttcgttggaaacgggagaatcttcacagaaaagctaaacagaagcattctcagaaacttctctgtgatgtttgtgttcaactcccagagtttcacattgcttttcatagagtagttctgaaacatgcttttcgtagtgtctgcaagtggacatttggagcgctttcaggcctgtggtggaaaacgaattatggtcacataaaaactggagagaagccttctcagaaacttctctgtgatgattgcatgcaactcacagatttgaaccctcctatggatagagcattgttgaaactctctttttgtggaatctgcaagtggatatgtggacctctccgaagatgtctttggaaacgggaatatcttcacataaaaactaaacagaagcattctcagaaacttcttggtgatgtttgcattcaaatcccagagttgaaccttcctttgatagttcaggtttgaaacactctttttgtaggatctgaaagtggatatttggaccactctgtggccttcgttcgaaacgggtacatcttcgcataaaatctagacagaagcattctcagaaaatactttgtgatgatttagtttaactcacagagctgaacattcctttggatggagcaggtttgagacacactttttgtagaatctacaagtggatatttggacctctctgaggatttcgttggaaacgggataactgcacctaactaaacggaagcattctcagaaactgctttgtgatgattgcattcacctcacagagttgaacattcctattgatagagcagtttggaaacactcttgttgtggaatgtgcaagtggagatttggagcgctttgaggcctgtggtagtaaagggaatagcttcatagaaaaactagacagatgcattctcaggaactttttggtgatgtttgtattcaactcccagagttgaactttcctttggaaagagcagctatgaaacactctttttctagaatctgcaagtggacgtttggagggctttgtggtttgtggtggaaaaggaaatatcttcacctaaatactagatagaagcattctcagaagcttctctgtgatgactgcattcaactcacggagttgaacactccttttgagagcgtagttttgaaactctctttctgtggcatctgcaaggggacatgtagacctctttgaagatttcgttggaaacggaatcatcttcacataaaaactatacagaagcagtctcagaatcttctttgtgatgtttgcattcaaatcccagagttgaacttgcctttcaaagttcacgtttgaaacactctttttgcaggatctacaagtggatatttggaccactctgtgtccttcgttcgaaacgggtatatcttcacatgacatctagacagaagctttctcagaaaatcctttgggatgattgagtggaactcacagagctgaacattccttgcgatgtagcagtttagaaacacactttctgcagaatctgcaagtgcatatgtggacctctctgaggaattcgttggaaacgggataatttcagctgactaaacagaagcattctcagaaccttcttcgtgatgtctgcattcaactcacagtgtggaacctttctttgatagttcaggtttgaaacactctttttgtagaaactgcaaggggataattgcacttctttgaggcctaccgtagtaaaggaaataacttcctatagaaagaagacagaagcattctcagaaccctcttcgtgatgtttgcattcaactcacagtgctgaacctttctttgatagttcagctttgaaacactcttcttgtagaaactgcaagtggatatttggtcctctctgaggatttcgttggaaacgggataaaccgcacagaactaaacagaagaattctcagagccctcttcgtgatgtttgcattcaactcacagtgctgaacctttctttgatagtgcagctttgaaacactctttttgtagaaactgcaagtggatgtttggtcctctctgaggatttcgttggaaacgggataaaccgcacagaactaaaacagaagcattgtcagaaacttctttgtgatgattgcattcaactcacagagttgaaggttccttttcaaacagcagtttccaatcactctttctgtggaatctgcaagtggatatttgggcctctctgaggatttcgttggaaacgggataaaacgcacagaactaaaacagaagcattctcagaaacttctctgtgatgtttgtgttcaactcccagagtttcacgttgcttttcatagagtagttctgaaacatgcttttcgtagtgtctgcaagtggacatttggagcgctttcaggcctgtggtggaaaacgaattatggtcacataaaaactggagagaagccttcacagaaacttctctgtgatgattgcattcaactcacagagttgaaccctcctatggatagagcagtgttgaaactctctttttgtggaatctgcaagtggatatgtggacctctttgaagatgtctttggaaacgggaatatcttcacataaaaactaaacggaagcattctcagaaacttcttggtgatgtttgcattcaaatcccagagttgaaccttcctttgatagttcaggtttgaaacactctttttgtaggatctgcaagtggatatttggaccacactgtggccttcgttcgaaacgggtacatcttcgcataatatctagacagaagcattctcagaaaacactttgtgatgattgagttgaactcacagagctgaccattcctttggatggagcaggtttgagacacactttttgtagaatctacaagtggatatttggacctctctgaggatttcgttggaaacgggataactgcacctaactaaacggaagcattctcagaaactgctttgtgatgattgcattcacctcacagagttgaacattcctattgatagagcagtttggaaacactcttgttgtggaatgtgcaagtggagatttggagcgctttgaggcctatggtagtaaagggaatagcttcatagaaaaactagacagatgcattctcaggaactttttggtgatgtttgtattcaactcccagagttgaactttcctttggaaagaggagctatgaaacactctttttctagaatctgcaagtggacgtttggagggctttgtggtttgtggtggaaaaggaaatatcttcacctaaatactagatagaagcatcctcagaagcttctctgtgatgactgcattcaactcacggagttgaacactccttttgagagcgcagttttgaaactctctttctgtggcatctgcaaggggacatgtagacctctttgaagatttcgttggaaacggaatcatcttcacataaaaactatacagaagcagtctcagaatcttctttgtgatgtttgcattcaaatccccgagttgaactttcctttcaaagttcacgtttgaaacactctttttgcaggatctacaagtggatatttggaccactctgtgtccttcgttcgaaacgggtatatcttcacatgacatctagacagaagctttctcagaaaattctttgggatgattgagttgaactcacagagctgagcattccttgcgatgtagcagtttagaaacacactttctgcagaatctgcaagtgcatatttggacctctgtgaggaattcgttggaaacgggataatttcagctgactaaacagaagcattctcagaaccttcttcgtgatgtctgcattcaactcacagtgtggaacctttctttgatagttcaggtttgaaacactctttttgtagaaactgcaaggggataattgcactctttgaggagtaccgtagtaaaggaaataacttcctataaaaagaagacagaagcattctcagtaaccctcttcgtgatgtttgcattcaactcacagtgctgaacctttctttgatagttcagctttgaaacactctttttgtagaaactgcaagtggatatttggtcctctctgaggaattcgttggaaacgggataaactgcacagaactaaacagaagcattctcagaaccttcttcgtgatgtttgcattcaactcacagtgttgaacctttctttgatagttcaggttggaaacggtctttctgtagaaactgcaagtagatatttggccctctctgaggatttctttggaaacggggtgaaccgcacagaactaaaacagaagcattcacagaaaactcttggtgacgactgagtttaactcacagagctgaacattcctttggatggagcagtttcgaaacacactatttgtagaatgtgcaagtggatatttgggcctctctgaggatttcgttggaaacgggataaaccgcacagaactaaacagaagcattctcagaaactactttgtgatgattgcattcaagtcacagagttgaacattccctttgacagagcagtttggaaactctctttgtgtagaatctgcaagtggagatatggaccgctttgaggcctatggtagtaaaggaaatagcttcatataaaagctagacagtagcattctcagaaacttctttgtgatgcttgcattcaactcacagagttgaactttcctttcgagagagaagctttgaaacactcttttttaagaatgtgcaagtggacatttggagggctttgaggcctgtggtggaaaaggaattatcttcccgtaaaagctagatagaagcattgtcagaaacttctttgtgatgattgcattcaactcacagagttgaaggttccttttcaaagagaagtttccaatcactctttctgtggaatctgcaagtggatatttcgacctattttgaagatttcgttggaaacgggataatcttcacagaaaagctaaacagaagcattctcagaaacttctctgtgatgtttgtgttcaactcccagagtttcacattgcttttcatagagtagttctgaagcatgcttttcgtagtgtctacaagtggacatttggagcgcttccaggcctgtggtggaaaacgaattatggtcacataaaaactggagagaagctttctcagaaacttctctgtgatgattgcattcaactcacagagttgaaccctcctatggatagagcagtgttgaaactctctttttggggaatctgcaagtggatatgtggacctctccgaagatgtctttggaaacgggaatatcttcacataataactaaacagaagcattctcagaaacttcttggtgatgtttgcattcaaatcccagagttgaaccttcctttgacagttcaggtttgaaacactctttttgtaggatctgcaagtggatatttggaccactctgtggccttcgttctaaacgggtacatcttctcataaaatctagacagaagcattctcagaaaatactttgtgatgattgagttgaactcacagagctgaacattcctttggatggagcaggtttgagacacactttttgtagaatctacaagtggatatttggacctctctgaggatttcgttggaaacgggataactgcacctaactaaacggaagcattctcagaaactgctttgtgatgattgcattcacctcacagagttgaacattcctattgatagagcagtttggaaacactcttgttgtggaatgtgcaagtggagatttggagcgctttgaggcctatggtagtaaagggaatagcttcatagaaaaactagacagatgcattctcaggaactttttggtgatgtttgtattcaactcccagagttgaactttcctttggaaagagcagctatgaaacactctttttctagaatctgcaagtggacgtttggagggctttgtggtttgtggtggaaaaggaaatatcttcacctaaatactagaaagaagcattctcagaagcttctctgtgatgactgcattcaactcacggagttgaacactccttttgagagcgcagttttggaactctctttctgtggcatctgcaaggggacatgtagacctctttgaagatttcgttggaaacggaatcatcttcacatcaaaactatacagaagcagtctcagaatcttctttgtgatgtttgcattcaaatcccagagttgaacttgcctttcaaagttcacgtttgaaacactctttttgcaggatctacaagtggatatttggaccactctgtgtccttcgttcgaaacgggtatatcttcacatgacatctagacagaagctttctcagaaaattctttgggatgattgagttgagcaaacagagctgaacactccttgcgatgtagcagtttagaaacaccctttctgcagaatctgcaagtgcatatgtggacctctctgaggaattcgttggaaacgggataatttcagctgactaaacagaagcattctcagtaaccttcttcgtgatgtctgcattcaactcacagtgtggaacctttctttgatagttcaggtttgaaacactctttttgtagaaactgcaaggggatcattgcacttctttgaggcctaccgtagtaaaggaaataacttcctataaaaagaagacagaagcattctcagaaccctcttcgtgatgcttgcattcaactcacggtgctgaacctttctttgatagttcagctttgaaacactctttttgtagaaactgcaagtggatatttggtcctctctgaggatttcgttggaaacgggataaaccgcacagaactaaacagaagcattctgagaaccttcttcgtgatgtttgcattcaactcacagtgttgaacctttctttgatagttcaggtttgaaacggtctttctgtagaaactgcaagtagatatttggacctctctgaggatttcgttggaaacgggataacccgcacagaactaaaacagaagcattcacagaaaactcttggtgacgactgagtttaactcacagagctgaacattcctttggatggagcagttttgaaacacactatttgtagaatgtgcaagtggatatttaggcctctctgaggatttcgttggaaacgggataaaccgcacagaactaaacagaagcattctcagaaactactttgtgatgattgcattcaagtcacagagttgaacattccctttgacagagcagtttggaaactctctttgtgtagaatctgcaagtggagatatggaccgctttgaggcctatggtagtaaaggaaatagcttcatataaaagctagacagtagcattctcagaaacttctttgtgatgcttgcattcaactcacagagttgaactttcctttcgagagagaagctttgaaacactctttttccagaatgtgcaagtggacatttggagggctttgaggcctgcggtggaaaaggaattatcttcccgtaaaagctagatagaagcattgtcagaaacttctttgtgatgattgcattcaactcacagagttgaaggttccttttcaaacagcagtttccaatcactctttctgtggaatctgcaagtggatatttggacctattttgaagatttcgttggaaacgggagaatcttcacagaaaagctaaacagaagcattctcagaaacttctctgtgatgtttgtgttcaactcccagagtttcacattgcatttcatagagtagttctgaaacatgcttttcgtagtgtctacaagtggacatttggagcgctttcaggcctgtggtggaaaacgaataatggtcacataaaaactggagagaagccttctcagaaacttctctgtgatgattgcattcaactcacagagttgaaccctcctatggatagagcagtgttgaaactctctttttgtggaatctgcaagtggatatgtggacctctccgaagatgtctttggaaacgggaatatcttcacataaaaactaaacagaagcattctcagaaacttcttggtgatgtttgcattcaaatccaagagttgaaccttcctttgataattcaggtttgaaacactctttttgtaggatctgcaagtggatatttggaccactctgtggccttcgttcgaaacgggtatatcttcgcataaaatctagacagaagcattctcagaaaatactttgtgatgattgagtttaactcacagagctgaacattcctttggatggagcaggtttgagacacactttttgtagaatctacaagtggatatttggacctctctgaggatttcgttggaaacgggataactgcacctaactaaacggaagcattctcagaaactgctttgtgatgattgcattcacctcacagagttgaacattcctattgatagagcagtttggaaacactcttgttgtggaatgtgcaagtggagatttggagcgctttgaggcctatggtagtaaagggaatagcttcatagaaaaactagacagatgcattctcaggaactttttggtgatgtttgtattcaactcccagagttgaactttcctttggaaagagcagctatgagacactgtttctctagaatctgcaagtggacgtttggagggctttgtggtttgtggtggaaaaggaaatatcttcacctaaatactagatagaagcattctcagaagcttctctgtgatgactgcattcaactcacggagttgaacactccttttgagagcgcagttttgaaactctctttctgtggcatctgcaaggggacatgtagacctctttgaagatttcgttggaaacggaatcatcttcacataaaaactatacagaagcagtctcagaatcttctttgtgatgtttgcattcaaatcccagagttgaactttcctttcaaagttcacgtttgaaacactctttttgcaggatctacaagtggatatttggaccactctgtgtccttcgttcgaaacgggtatatcttcacatgacacctagacagaagctttctcagaaaattctttgggatgattgagttgaactcacagagctgagcattccttgcgatgtagcagtttagaaacacactttctgcagaatctgcaagtgcatatttggacctctctgaggaattcgttggaaacgggataatttcagctgactaaacagaagcattctcagaaccttcttcgtgatgtctgcattcaactcacagtgtggaacctttctttgatagttcaggtttgaaacactctttttgtagaaactgcaaggggatcattgcactctttgaggagtaccgtagtaaaggaaataacttcctataaaaagaagacagaagcattctcagaaccctcttcgtgatgtttgcattcaactcacagtgctgaacatttctttgatagttcagctttgaaacactctttttgtagaaactgcaagtggatatttggtcctctctgagcatttcgttggaaacgggataaactgcacagaactaaacagaagcattctcagaaccttcttcgtgatgtttgcattcaactcacagtgttgaacctttctttgatagttcaggtttgaaacggtctttctgtagaaactgcaagtagatatttggacctctctgaggatttcgttggaaacgggataacccgcacagaactaaaacagaagcattcacagaaaactcttggtgacgactgagtttaactcacagagctgaacattcctttggatggagcagtttcgaaacacactatttgtagaatctgcaagtggatattttggcctctctgaggatttcgttggaaacgggataaaacgcacagaaataaaacagaagcattctcagtaaactactttgtgatgattgcattcaagtcacagagttgaacattccctttgacagagcagtttggaaactctctttgtgtagaatctgcaagtggagatatggaccgctttgaggcctatggtagtaaaggaaatagcttcatataaaagctagacagtagcattctcagaaacttctttgtgatgcttgcattcaactcacagagttgaactttcctttcgagagagaagctttgaaacactctttttccagaatgtgcaagtggacatttggggagctttgaggcctgtggaggaaaaggaattatcttcccgtaaaagctagatagaagcattgtcagaaacttctttgtgatgattgcattcaactcacagagttgaaggttccttttcaaacagcagtttccaatcactctttctgtggaatctgcaagtggatatttcgacctctttgaagatttcgttggaaacgggagaatcttcacagaaaagctaaacagaagcattctcagaaacttctctgtgatgtttgtgttcaactcccagagtttcacgttgcttttcatagagtagttctgaaacatgcttttcgtagtgtctgcaagtggacatttggagcgctttcaggcctgtggtggaaaacgaattatggtcacataaaaactggagagaagccttctcagaaacttctctgtgatgattgcattcaactcacagagttgaaccctcctatggatagagcagtgttgaaactctctttttgtggaatctgcaagtggatatgtggacctctccgaagatgtctttggaaacgggaatatcttcacataaaaactaaacagaagcattctcagaaacttcttggtgatgtttgcattcaaatcccagagttgaaccttcctttgatagttcaggtttgaaacactctttctgtaggatctgcaagtggctatttggaccactctgtggccttcgttcgaaacgggtatatcttcgcataaaatctagacagaagcattctcagaaaatactttgtgatgattgagtttaaatcacagagctgaccattcctttggatggagcaggtttgagacacactttttgtagaatctacaagtggatatttggacctctctgaggatttcgttggaaacgggataactgcacctaactaaacggaagcattctcagaaactgctttgtgatgattgcattcacctcacagagttgaacattcctattgatagagcagtttggaaacactcttgttgtggaatgtgcaagtggagatttggagcgctttgaggcctgtggtagtaaagggaatagcttcatagaaaaactagacagatgcattctcaggaactttttggtgatgtttgtattcaactcccagagttgaactttcctttggaaagagcagctatgaaacactctttttctagaatctgcaagtggacgtttggagggctttgtggtttgtggtggaaaaggaaatatcttcacctaaatactagatagaagcattctcagaagcttctctgtgatgactgcattcaactcacggagttgaacactccttttgagagcgcagttttgaaactctctttctgtggcatctgcaaggggacatgtagacctctttgaagatttcgttggaaacggaatcatcttcacataaaaactatacagaagcagtctcagaatcttctttgtgatgtttgcattcaaatcccagagttgaactttcctttcaaagttcacgtttgaaacactctttttgcaggatctacaagtggatatttggaccactctgtgtccttcgttcgaaacgggtatatcttcacacgacatctagacagaagctttctcagaaaattctttgggatgattgagtggaactcacagagctgaacattccttgcgatgtagcagtttagaaacacactttctgcagaatctgcaagtgcatatttggacctctctgaggaattcgttggaaacgggataatttcagctgactaaacagaagcattctcagaaccttcttcgtgatgtctgcattcaactcacagtgtggaacctttctttgatagttcaggtttgaaacactctttttgtagaaactgcaaggggataattgcacttctttgaggcctaccgtagtaaaggaaataacttcctatagaaagaagacagaagcattctcagaaccctcttcgtgatgtttgcattcaactcacagtgctgaacctttctttgatagttcagctttgaaacactcttcttgtagaaactgcaagtggatatttggtcctctctgaggatttcgttggaaacgggataaaccgcacagaactaaacagaagaattctcagagccctcttcgtgatgtttgcattcaactcacagtgctgaacctttctttgatagtgcagctttgaaacactctttttgtagaaactgcaagtggatgtttggtcctctctgaggatttcgttggaaacgggataaaccgcacagaactaaaacagaagcattgtcagaaacttctttgtgatgattgcattcaactcacagagttgaaggttccttttcaaacagcagtttccaatcactctttctgtggaatctgcaagtggatatttgggcctctctgaggatttcgttggaaacgggataaaacgcacagaactaaaacagaagcattctcagaaacttctctgtgatgtttgtgttcaactcccagagtttcacgttgcttttcatagagtagttctgaaacatgcttttcgtagtgtctgcaagtggacatttggagcgctttcaggcctgtggtggaaaacgaattatggtcacataaaaactggagagaagccttctcagaaacttctctgtgatgattgcattcaactcacagagttgaaccctcctatggatagagcagtgttgaaactctctttttgtggaacctgcaagtggatatgtggacctctccgaagatgtctttggaaacgggaatatcttcacataaaaactaaacagaagcattctcagaaacttcttggtgatgtttgcattcaaatcccagagttgaaccttcctttgatagttcaggtttgaaacactctttctgtaggatctgcaagtggctatttggaccactctgtggccttcgttcgaaacgggtatatcttcgcataaaatctagacagaagcattctcagaaaatactttgtgatgattgagtttaaatcacagagctgaccattcctttggatggagcaggtttgagacacactttttgtagaatctacaagtggatatttggacctctctgaggatttcgttggaaacgggataactgcacctaactaaacggaagcattctcagaaactgctttgtgatgattgcattcacctcacagagttgaacattcctattgatagagcagtttggaaacactcttgttgtggaatgtgcaagtggagatttggagcgctttgaggcctatggtagtaaagggaatagcttcatagaaaaactagacagatgcattctcaggaactttttggtgatgtttgtattcaactcccagagttgaactttcctttggaaagagcagctatgaaacactctttttctagaatctgcaagtggacgtttggagggctttgtggtttgtggtggaaaaggaaatatcttcacctaaatactagatagaagcattctcagaagcttctctgtgatgactgcattcaactcacggagttgaacactccttttgagagcgcagttttgaaactctctttctgtggcatctgcaaggggacatgtagacctctttgaagatttcgttggaaacggaatcatcttcacataaaaactatacagaagcagtctcagaatcttctttgtgatgtttgcattcaaatcccagagttgaactttcctttcaaagttcacgtttgaaacactctttttgcaggatctacaagtggatatttggaccactctgtgtccttcgttcgaaacgggtatatcttcacacgacatctagacagaagctttctcagaaaattctttgggatgattgagtggaactcacagagctgaacattccttgcgatgtagcagtttagaaacacactttctgcagaatctgcaagtgcatatttggacctctctgaggaattcgttggaaacgggataatttcagctgactaaacagaagcattctcagaaccttcttcgtgatgtctgcattcaactcacagtgtggaacctttctttgatagttcaggtttgaaacactctttttgtagaaactgcaaggggataattgcacttctttgaggcctaccgtagtaaaggaaataacttcctatagaaagaagacagaagcattctcagaaccctcttcgtgatgtttgcattcaactcacagtgctgaacctttctttgatagttcagctttgaaacactcttcttgtagaaactgcaagtggatatttggtcctctctgaggatttcgttggaaacgggataaaccgcacagaactaaacagaagcattctcagagccctcttcgtgatgtttgcattcaactcacagtgctgaacctttctttgatagtgcagctttgaaacactctttttgtagaaactgcaagtggatatttggtcctctctgaggatttcgttggaaacgggataaaccgcacagaactaaaacagaagcattgtcagaaacttctttgtgatgattgcattcaactcacagagttgaaggttccttttcaaacagcagtttccaatcactctttctgtggaatctgcaagtggatatttgggcctctctgaggatttcgttggaaacgggataaaacgcacagaactaaaacagaagcattctcagaaacttctctgtgatgtttgtgttcaactcccagagtttcacgttgcttttcatagagtagttctgaaacatgcttttcgtagtgtctgcaagtggacatttggagcgctttcaggcctgtggtggaaaacgaattatggtcacataaaaactggagagaagcattctcaggaaaatactttgtgatgattgagtttaaatcacagagctgaccattcctttggatggagcaggtttgagacacactttttgtagaatctacaagtggatatttggacctctctgaggatttcgttggaaacgggataactgcacctaactaaacggaagcattctcagaaactgctttgtgatgattgcattcacctcacagagttgaacattcctattgatagagcagtttggaaacactcttgttgtggaatgtgcaagtggagatttggagcgctttgaggcctatggtagtaaagggaatagcttcatagaaaaactagacagatgcattctcaggaactttttggtgatgtttgtattcaactcccagagttgaactttcctttggaaagagcagctatgaaacactctttttctagaatctgcaagtggacgtttggagggctttgtggtttgtggtggaaaaggaaatatcttcacctaaatactagatagaagcatcctcagaagcttctctgtgatgactgcattcaactcacggagttgaacactccttttgagagcgcagttttgaaactctctttctgtggcatctgcaaggggacatgtagacctctttgaagatttcgttggaaacggaatcatcttcacataaaaactacacagaagcagtctcagaatcttctttgtgatgtttgcattcaaatccccgagttgaactttcctttcaaagttcacgtttgaaacactctttttgcaggatctacaagtggatatttggaccactctgtgtccttcgttcgaaacgggtatatcttcacatgacatctagacagaagctttctcagaaaattctttgggatgattgagttgaactcacagagctgagcattccttgcgatgtagcagtttagaaacacactttctgcagaatctgcaagtgcatatttggacctctctgaggaattcgttggaaacgggataatttcagctgactaaacagaagcattctcagaaccttcttcgtgatgtctgcattcaactcacagtgtggaacctttctttgatagttcaggtttgaaacactctttttgtagaaactgcaaggggatcattgcactctttgaggagtaccgtagtaaaggaaataacttcctataaaaagaagacagaagcattctcagaaccctcttcgtgatgtttgcattcaactcacagtgctgaacctttctttgatagttcagctttgaaacactctttttgtagaaactgcaagtggatatttggtcctctctgagcatttcgttggaaacgggataaactgcacagaactaaacagaagcattctcagaaccttcttcgtgatgtttgcattcaactcacagtgttgaacctttctttgatagttcaggtttgaaacggtctttctgtagaaactgcaagtagatatttggacctctctgaggatttcgttggaaacgggataacccgcacagaactaaaacagaagcattcacagaaaactcttggtgacgactgagtttaactcacagagctgaacattcctttggatggagcagtttcgaaacacactatttgtagaatgtgcaagtggatatttaggcctctctgaggatttcgttggaaacgggataaaccgcacagaactaaacagaagcattctcagaaactactttgtgatgattgcattcaagtcacagagttgaacattccctttgacagagcagtttggaaactctctttgtgtagaatctgcaagtggagatacggaccgctttgaggcctatggtagtaaaggaaatagcttcatataaaagctagacagtaagcattctcagaaacttctttgtgatgcttgcattcaactcacagagttgaactttcctttcgagagagaagctttgaaacactctttttccagaatctgcaagtggacatttggagggctttgaggcctgtggtggaaaaggaattatcttcccgtaaaagctagatagaagcattgtcagaaacttctttgtgatgattgcattcaactcacagagttgaaggttccttttcaaagagcagtttccaatcactctttgtgtgtaatctgcaagtggatattcggacctattttgaagatttcgttggaaacgggagaatcttcacaggaaagctaaacagaagcattctcagaaacttctctgtgatgtttgtgttcaactcccagagtttcacattgcttttcatagagtagttctgaaacatgcttttcgtagtgtctgcaagtggacatttggagcgctttcaggcctgtggtggaaaacgaattatggtcacataaaaactggagagaagccttctcagaaacttctctgtgatgattgcattcaactcacagagttgaaccctcctatggatagagcagtgttgaaactctctttttgtggaatctgcaagtggatatgtggacctctccgaagatgtctttggaaacgggaatatcttcacataaaaactaaacagaagcattctcagaaacttcttggtgatgtttgcattcaaatcccagagttgaaccttcctttgatagttcaggtttgaaacactctttttgtaggatctgcaagtggatatttggaccactctgtggccttcgttcgaaacgggtacatcttcacataaaatctagacagaagcattctcagaaaaacctttgggatgattgagttgaactcacagagctgaacattcctttggatggagcaggtttgagacacactttttgtagaatctacaagtggatatttggacctctctgaggatttcgtcggaaacgggataactgcacctaacaaaacggaagcattctcagaaactgctttgtgatgattgcattcacctcacagagttgaacattcctattgatagagcagtttggaaacactcttgttgtggaatgtgcaagtggagatttggagcgctttgaggcctatggtagtaaagggaatagcttcatagaaaaactagacagatgcattctcaggaactttttggtgatgtttgtattcaactgccagagttgaactttccttaggaaagagcagctatgaaacactctttttctagaatctgcaagtggacgtttggagggctttgtggtttgtggtggaaaaggaaatatcttcacctaaatactagagagaagcattctcagaagcttctctgtgatgactgcattcaactcacggagttgaacactccttttgagagcgcacttttgaaactctctttctgtggcatctgcaaggggacatgtagacctctttgaagatttcgttggaaacggaatcatcttcacataaaaactatacagaagcagtctcagaatcttctttgtgatgtttgcattcaaatcccagagttgaactttcctttcaaagttcacgtttgaaacactctttttgcaggatctacaagtggatatttggaccactctgtgtccttcgttcgaaacgggtatatcttcacatgacatctagacagaagctttctcagaaaattctttgggatgattgagttgaactcacagagctgaacattccttgcgatggagcagtttagaaacacactttctgcagaatctgcaagtgcatatttggacctctctgaggaattcgttggaaacgcgataatttcaggtgactaaacagaagcattctcagaaccttcttcgtgatgtctgtattcaactcacagtgtggaacctttctttgatagttcaggtttgaaacactcctttcgtagaaactgcaaggggataattgcacttctctgaggcctaccgtagtaaaggaaataacttcctataaaaagaagacagaagaattctcagaaccctcttcgtgatgtttgcattccacacacagtgctgaaactttctttgatagttcagctttgaaacactctttttgtagaaactgcaagtggatatttggtcctctctgaggatttcgttggaaacgtgataaaccgcacagaactaaacagaagcattcacagaaaactcttggtgacgactgagtttaactcacagagctgaacattcctttggatggagcagtttcgaaacacactctttgtagaatctgcaagtggatatttgggcctctctgaggatttcgttggaaatgggataaaccgcacagaactaaaacagaagcattctcagaaactactttgtgatgattgcattcaagtcacagagttgaacattccctttgacagagcagtttggaaactctctttgtgtagaatctgcaagtggagatatggaccgctttgaggcctatggtagtaaaggaaatagcttcatataaaagctagacagtagcattctcagaaacttctttgtgatgcttgcattcaactcacagagttgaactttcctttcgagagagaagctttgaaacactctttttccagaatgtgcaagtggacatttggggagctttgaggcctgtggtggaaaaggaattatcttcccgtaaaagctagatagaagcattgtcagaaacttctttgtgatgattgcattcaactcacaggagttgaaggttccttttcaaacagcagtttccaatcactctttctgtggaatctgcaagtggatatttcgacctctttgaagatttcgttggaaacgggagaatcttcacagaaaagctaaacagaagcattctcagaaacttctctgtgatgtttgtgttcaactcccagagtttcacgttgcttttcatagagtagttctgaaacatgcttttcgtagtgtctgcaagtggacatttggagcgctttcaggcctgtggtggaaaacgaattatggtcacataaaaactggagagaagccttctcagaaacttctctgtgatgattgcattcaactcacagagttgaaccctcctatggatagagcagtgttgaaactctctttttgtggaatctgcaagtggatatgtggacctctccgaagatgtctttggaaacgggaatatcttcacataaaaactaaacagaagcattctcagaaacttcttggtgatgtttgcattcaaatcccagagttgaaccttcctttgatagttcaggtttgaaacactctttctgtaggatctgcaagtggctatttggaccactctgtggccttcgttcgaaacgggtatatcttcgcataaaatctagacagaagcattctcagaaaatacttagtgatgattgagtttaactcacagagctgaacattcctttgaatggagcaggtttgagacacaatttttgtagaatctacaagtggatatttggacctctctgaggatttcgttggaaacgggataactgcacctaactaaacggaagcattctcagaaactgctttgtgatgattgcattcacctcacagagttgaacattcctattgatagagcagtttggaaacactcttgttgtggaatgtgcaagtggagatttggagcgctttgaggcctatggtagtaaagggaatagcttcatagaaaaactagacaggatgcattctcaggaactttttggtgatgtttgtattcaactcccagagttgaactttcctttggaaagagcagctatgaaacactctttttctagaatctgcaagtggacgtttggagggctttgtggtttgtggtggaaaaggaaatatcttcacctaaatactagatagaagcattctcagaagcttctctgtgatgactgcattcaactcacggagttgaacactccttttgagagcgcagttttgaaactctctttctgtggcatctgcaaggggacatgtagacctctttgaagatttcgttggaaacggaatcatcttcacataaaaactatacagaagcagtctcagaatcttctttgtgatgtttgcattcaaatcccagagttgaacttgcctttcaaagttcacgtttgaaacactctttttgcaggatctacaagtggatatttggaccactctgtgtccttcgttcgaaacgggtatatcttcacatgacatctagacagaagctttctcagaaaatcctttgggatgattgagtggaactcacagagctgaacattccttgcgatgtagcagtttagaaacacactttctgcagaatctgcaagtgcatatgtggacctctctgaggaattcgttggaaacgggataatttcagctgactaaacagaagcattctcagaaccttcttcgtgatgtctgcattcaactcacagtgtggaacctttctttgatagttcaggtttgaaacactctttttgtagaaactgcaaggggataattgcacttctttgaggcctaccgtagtaaaggaaataacttcctatagaaagaagacagaagcattctcagaaccctcttcgtgatgtttgcattcaactcacagtgctgaacctttctttgatagttcagctttgaaacactcttcttgtagaaactgcaagtggatatttggtcctctctgaggatttcgttggaaacgggataaaccgcacagaactaaacagaagcattctcagagccctcttcgtgatgtttgcattcaactcacagtgctgaacctttctttgatagtgcagctttgaaacactctttttgtagaaactgcaagtggatgttttgtcctctctgaggatttcgttggaaacgggataaaccgcacagaactaaaacagaagcattcacagaaaactcttggtgacgactgagtttaactcacagagctgaacattcctttggatggagcagtttcgaaacacactatttgtagaatctgcaagtggatatttgggcctctctgaggatttcgttggaaacgggataaaacgcacagaaataaaacagaagcattctcagaaactactttgtgatgattgcattcaagtcacagagttgaacattccctttgacagagaagtttggaaactctctttgtgtagaatctgcaagtggagatatggaccgctttgaggcctatggtagtaaaggaaatagcttcatataaaagctagacagtagcattctcagaaacttctttgtgatgcttgcattcaactcacagagttgaactttcctttcgagagagaagctttgaaacactctttttccagaatctgcaagtggacatttggagggctttgaggcctgtggtggaaaaggaattatcttctcgtaaaagctagatagaagcattgtcagaaacttctttgtgatgattgcattcaactcacagagttgaaggttccatttcaaacagcagtttccaatcactctttctgtggaatctgcaagtggatatttcgacctctttgaagatttcgttggaaacgggataatcttcacagaaaagctaaacagaagcattctcagaaacttctctgtgatgtttgtgttcaactcccagagtttcacgttgcttttcatagagtagttctgaaacatgcttttcgtagtgtctgcaagtggacatttggagcgctttcaggcctgtggtggaaaacgaattatggtcacataaaaactggagagaagccttctcagaaacttctctgtgatgattgcattcaactcacagagttgaaccctcctatggatagagcagtgttgaaactctctttttgtggaatctgcaagtggatatgtggacctctccgaagatgtctttggaaacgggaatatcttcacataaaaactaaacagaagcattctcagaaacttcttggtgatgtttgcattcaaatcccagagttgaaccttcctttgatagttcaggtttgaaacactctttctgtaggatctgcaagtggctatttggaccactctgtggccttcgttcgaaacgggtatatcttcgcataaaatctagacagaagcattctcagaaaatactttgtgatgattgagtttaaatcacagagctgaccattcctttggatggagcaggtttgagacacactttttgtagaatctacaagtggatatttggacctctctgaggatttcgttggaaacgggataactgcacctaactaaacggaagcattctcagaaactgctttgtgatgattgcattcacctcacagagttgaacattcctattgatagagcagtttggaaacactcttgttgtggaatgtgcaagtggagatttggagcgctttgaggcctgtggtagtaaagggaatagcttcatagaaaaactagacagatgcattctcaggaactttttggtgatgtttgtattcaactcccagagttgaactttcctttggaaagagcagctatgaaacactctttttctagaatctgcaagtggacgtttggagggctttgtggtttgtggtggaaaaggaaatatcttcacctaaatactagatagaagcattctcagaagcttctctgtgatgactgcattcaactcacggagttgaacactccttttgagagcgcagttttgaaactctctttctgtggcatctgcaaggggacatgtagacctctttgaagatttcgttggaaacggaatcatcttcacataaaaactatacagaagcagtctcagaatcttctttgtgatgtttgcattcaaatcccagagttgaactttcctttcaaagttcacgtttgaaacactctttttgcaggatctacaagtggatatttggaccactctgtgtccttcgttcgaaacgggtatatcttcacacgacatctagacagaagctttctcagaaaattctttgggatgattgagtggaactcacagagctgaacattccttgcgatgtagcagtttagaaacacactttctgcagaatctgcaagtgcatatttggacctctctgaggaattcgttggaaacgggataatttcagctgactaaacagaagcattctcagaaccttcttcgtgatgtctgcattcaactcacagtgtggaacctttctttgatagttcaggtttgaaacactctttttgtagaaactgcaaggggataattgcacttctttgaggcctaccgtagtaaaggaaataacttcctatagaaagaagacagaagcattctcagaaccctcttcgtgatgtttgcattcaactcacagtgctgaacctttctttgatagtgcagctttgaaacactcttcttgtagaaactgcaagtggatatttggtcctctctgaggatttcgttggaaacgggataaaccgcacagaactaaacagaagaattctcagagccctcttcgtgatgtttgcattcaactcacagtgctgaacctttctttgatagtgcagctttgaaacactctttttgtagaaactgcaagtggatgtttggtcctctctgaggatttcgttggaaacgggataaaccgcacagaactaaaacagaagcattgtcagaaacttctttgtgatgattgcattcaactcacagagttgaaggttccttttcaaacagcagtttccaatcactctttctgtggaatctgcaagtggatatttgggcctctctgaggatttcgttggaaacgggataaaacgcacagaactaaaacagaagcattctcagaaacttctctgtgatgtttgtgttcaactcccagagtttcacgttgcttttcatagagtagttctgaaacatgcttttcgtagtgtctgcaagtggacatttggagcgctttcaggcctgtggtggaaaacgaattatggtcacataaaaactggagagaagccttctcagaaacttctctgtgatgattgcattcaactcacagagttgaaccctcctatggatagagcagtgttgaaactctctttttgtggaatctgcaagtggatatgtggacctctccgaagatgtctttggaaacgggaatatcttcacataaaaactaaacagaagcattctcagaaacttcttggtgatgtttgcattcaaatcccagagttgaaccttcctttgatagttcaggtttgaaacactctttttgtaggatctgcaagtggctatttggaccactctgtggccttcgttcgaaacgggtatatcttcgcataaaatctagacagaagcattctcagaaaatactttgtgatgattgagttgaactcacagagctgaacattcctttggatggagcaggtttgagacacactttttgtagaatctacaagtggatatttggacctctctgaggatttcgttggaaacgggataactgcacctaactaaacggaagcattctcagaaactgctttgtgatgattgcattcacctcacagagttgaacattcctattgatagagcagtttggaaacactcttgttgtggaatgtgcaagtggagatttggagcgctttgaggtctatggtagtaaagggaatagcttcatagaaaaactagacagatgcattctcaggaactttttggtgatgtttgtattcaactcccagagttgaactttcctttggaaagagcagctatgaaacactctttttctagaatctgcaagtggacgtttggagggctttgtggtttgtggtggaaaaggaaatatcttcacctaaatactagatagaagcattctcagaagcttctctgtgatgactgcattcaactcacggagttgaacactccttttgagagcgcagttttgaaactctctttctgtggcatctgcaaggggacatgtagacctctttgaagatttcgttggaaacggaatcatcttcacataaaaactatacagaagcagtctcagaatcttctttgtgatgtttgcattcaaatcccagagttgaactttcctttcaaagttcacgtttgaaacactctttttgcaggatctacaagtggatatttggaccactctgtgtccttcgttcgaaacgggtatatcttcacacgacatctagacagaagctttctcagaaaattctttgggatgattgagtggaactcacagagctgaacattccttgcgatgtagcagtttagaaacacactttctgcagaatctgcaagtgcatatttggacctctctgaggaattcgttggaaacgggataatttcagctgactaaacagaagcattctcagaaccttcttcgtgatgtctgcattcaactcacagtgtggaacctttctttgatagttcaggtttgaaacactctttttgtagaaactgcaaggggataattgcacttctttgaggcctaccgtagtaaaggaaataacttcctatagaaagaagacagaagcattctcagaaccctcttcgtgatgtttgcattcaactcacagtgctgaacctttctttgatagttcagctttgaaacactcttcttgtagaaactgcaagtggatatttggtcctctctgaggatttcgttggaaacgggataaaccgcacagaactaaacagaagcattctcagagccctcttcgtgatgtttgcattcaactcacagtgctgaacctttctttgatagtgcagctttgaaacactctttttgtagaaactgcaagtggatatttggtcctctctgaggatttcgttggaaacgggataaaccgcacagaactaaaacagaagcattcacagaaaactcttgttgacgactgagtttaactcacagagctgaacattcctttggatggagcagtttcgaaacacactatttgtagaatctgcaagtggatatttgggcctctctgaggatttcgttggaaacgggataaaacgcacagaactaaaacagaagcattctcagaaactactttgtgattattgcattcaagtcacagagttgaacattccctttgacagagcagtttggaaactctctttgtgtagaatctgcaagtggagatatggaccgctttgaggcctatggtagtaaaggaaatagcttcatataaaagctagacagtagcattctcagaaacttctttgtgatgcttgcattcaactcacagagttgaactttcctttcgagagagaagctttgaaacactctttttccagaatgtgcaagtggacatttggggagctttgaggcctgtggaggaaaaggaattatcttcccgtaaaagctagatagaagcattgtcagaaacttctttgtgatgattgcattcaactcacagagttgaaggttccttttcaaacagcagtttccaatcactctttctgtggaatctgcaagtggatatttcgacctctttgaagatttcgttggaaacgggagaatcttcacagaaaagttcaacagaagcattctcagaaacttctctgtgatgtttgtgttcaactcccagagtttcacattgcttttcatagagtagttctgaaacatgcttttcgtagtgtctacaagtggacatttggagcgcttccaggcctgtggtggaaaacgaattatggtcacataaaaactggagagaagccttctcagaaacttctctgtgatgattgcattcaactcacagagttgaaccctcctatggatagagcagtgttgaaactctctttttgtggaatctgcaagtggatatgtggacctctttgaagatgtctttggaaacgggaatatcttcacataaaaactaaacggaagcattctcagaaacttcttggtgatgtttgcattcaaatcccagagttgaaccttcctttgatagttcaggtttgaaacactctttttgtaggatctgcaagtggatatttggaccactctgtggccttcgttcaaaacgggtatatcttcgcataaaatctagacagaagcattctcagaaaatactttgtgatgattgagttgaactcacagagctgaacattcctttggatggagcaggtttgagacacactttttgtagaatctacaagtggatatttggacctctctgaggatttcgttggaaacgggataactgcacctaactaaacggaagcattctcagaaactgctttgtgatgattgcattcacctcacagagttgaacattcctattgatagagcagtttggaaacactcttcttgtggaatgtgcaagtggagatttggagcgctttgaggcctatggtagtaaagggaatagcttcatagaaaaactagacagatgcattctcaggaactttttggtgatgtttgtattcaactcccagagttgaactttcctttggaaagagcagctatgaaacactctttttctagaatctgcaagtggacgtttggagggctttgtggtttgtggtggaaaaggaaatatcttcacctaaatactagatagaagcattctcagaagcttctctgtgatgactgcattcaactcacggagttgaacactccttttgagagcgcagttttggaactctctttctgtggcatctgcaaggggacatgtagacctctttgaagatttcgttggaaacggaatcatcttcacataaaaactatacagaagcagtctcagaatcttctttgtggtgtttgcattcaaatcccagagttgaactttcctttcaaagttcacgtttgaaacactctttttgcaggatctacaagtggatatttggaccactctgtgtccttcgttcgaaacgggtatatcttcacatgacatctagacagaagctttctcagaaaattctttgggatgattgagtggaattcacagagctgaacattccttgcgatgtagcagtttagaaacacactttctgcagaatctgcaagtgcatatttggacctctctgaggaattcgttggaaacgggataatttcagctgactaaacagaagcattctcagaaccttcttcctgatgtctgcattcaactcacagtgtggaacctttctttgatagttcaggtttgaaacactctttttgtagaaactgcaaggggataattgcacttctttgaggcctaccgtagtaaaggaagtatcttcctatagaaagaagacagaagaattctcagaaccctcttcgtgatgtttgcattccacacacagtgctgaaactttctttgatagttcagctttgaaacactctttttgtggaaactgcaagtggatatttggtcctctctgaggatttcgttggaaacgggataaaccgcacagaactaaacagaagcattctcagaaccttcttcgtgatgtttgcattcaactcacagtgttgaacctttctttgatagttcaggtttgaaacggtctttctgtagaaactgcaagtagatatttggacctctctgaggatttcgttggaaacgggataacccgcacagaactaaaacagaagcattcacagaaaactcttggtgacgactgagtttaactcacagagctgaacattcctttggatggagcagtttcgaaacacactatttgtagaatgtgcaagtggatatttaggcctctctgaggatttcgttggaaacgggataaaccgcacagaactaaacagaagcattctcagaaactactttgtgatgattgcattcaagtcacagagttgaacattccctttgacagagcagtttggaaactctctttgtgtagaatctgcaagtggagatatggacctctttgaggcctatggtagtaaaggaaatagcttcatataaaagctagacagtagcattctcagaaacttctttgtgatgcttgcattcaactcacagatgttgaactttcctttcgagagagaagctttgaaacactctttttccagaatctgcaagtggacatttggagggctttgaggcctgtggtggaaaaggaattatcttcccgtaaaagctagatagaagcattgtcagaaacttctttgtgatgattgcatacaagtcacagagttgaaggttccttttcaaagagcagtttccaatcacactttctgtggaatctgcaagtggatatttggacctctttgaagatttcgttggaaacgggagaatcttcacaaaaaagctaaacagaagcattctcagaaacttctctgtgatgtttgtgttcaactcccagagtttcacattgcttttcatagagtagttctgaaacatgcttttcgtagtgtctgcaagtggacatttggagcgctttcaggcctgtggtggaaaacgaattatggtcacataaaaactggagagaagccttctcagaaacttctctgtgatgattgcattcaactcacagagttgaaccctcctatggatagagcagtgttgaaactctctttttgtggaatctgcaagtggatatgtggacctctccgaagatgtctttggaaacgggaatatcttcacctaaaaactaaacagaagcattctcagaaacttcttggtgatgtttgcattcaaatcccagagttgaaccttcctttgatagttcaggtttgaaacactctttttgtaggatctgcaagtggctatttggaccactctgtggccttcgttcgaaacgggtatatcttcgcataaaatctagacagaagcattctcagaaaatgctttgtgatgattgagttgaactcacagagctgaacattcctttggatggagcaggcttgagacacactttttgtagaatctacaagtggatatttggacctctctgaggatttcgttggaaacgggataactgcacctaactaaacggaagcattctcagaaactggtttgtgatgattgcattcacctcacagagttgaacattcctattgatagagcagtttggaaacactcttgttgtggaatgtgcaagtggagatttggagcgctttgaggcctatggtagtaaagggaatagcttcatagaaaaactagacagatgcattctcaggaactttttggtgatgtttgtattcaactcccagagttgaactttcctttggaaagagcagctatgaaacactcttttttctagaatctgcaagtggacgtttggagggctttgtggtttgtggtggaaaaggaaatatcttcacctaaatactagatagaagcattctcagaagcttctctgtgatgactgcattcaactcacggagttgaacactccttttgagagcgcagttttgaaactctctttctgtggcatctgcaaggggacatgtagacctctttgaagatttcgttggaaacggaatcatcttcacatcaaaactatacagaagcagtctcagaatcttctttgtgatgtttgcattcaaatcccagagttgaactttcctttccaagttcacgtttgaaacactctttttgcaggatctacaagtggatatttggaccactctgtgtccttcgttcgaaacgggtatatcttcacatgacatctagacagaagctttctcagaaaattctttgggatgattgagttgagcaaacagagctgaacactccttgcgatgtagcagtttagaaacacactttctgcagaatctgcaagtgcatatgtggacctctctgaggaattcgttggaaacgggataatttcagctgactaaacagaagcattctcagaaccttcttcgtgatgtctgcattcaactcacagtgtggaacctttctttgatagttcaggtttgaaacactctttttgtagaaactgcaaggggatcattgcacttctttgaggcctaccgtagtaaaggagataacttcctataaaaagaagacagaagcattctcagaaccctcttcgtgatgtttgcattcaactcacggtgctgaacctttctttgatagttcagctttgaaacactctttttgtagaaactgcaagtggatatttggtcctctctgaggatttcgttggtaacgggataaaccgcacagaactaaacagaagcattctcagaaccttcttcgtgatgtttgcattcaactcacagtgttgaacctttctttgatagttcaggtttgaaacggtctttctgtagaaactgcaagtagatatttggacctctctgaggatttcgttggaaacgggataacccgcacagaactaaaacagaagcattcacagaaaactcttggtgacgactgagtttaacacacagagctgaacattcctttggatggagcagtttcgaaacacactatttgtagaatgtgcaagtggatatttaggcctctctgaggatttcgttggaaacgggataaaccgcacagaactaaacagaagcattctcagaaactactttgtgatgattgcattcaagtcacagagttgaacattccctttgacagagcagtttggaaactctctttgtgtagaatctgcaagtggagatatggaccactttgaggcctatggtagtaaaggaaatagcttcatataaaagctagacagtagcattctcagaaacttctttgtgatgctcgcattcaactcacagagttgaactttcctttcgagagagaagctttgaaacactctttttccagaatctgcaagtggacatttggagggctttgaggcctgtggtggaaaaggaattatcttcccgtaaaagctagatagaagcattgtcagaaacttctttgtgatgattgcattcaactcacagagttgaaggttccttttcaaagagcagtttccaatcactctttctgtggaatctgcaagtggatatttggacctattttgaagatttcgttggaaacgggagaatcttcacaggaaagctaaacagaagcattctcagaaacttctctgtgatgtttgtgttcaactcccagagtttcacattgcttttcatagagtagttctgaaacatgcttttcgtagtgtctacaagtggacatttggagcgctttcaggcctgtggtggaaaacgaattatggtcacataaaaactggagagaagccttctcagaaacttctctgtgatgattgcattcaactcacagagttgaaccctcctatggatagagcagtgttgaaactctctttttgtggaatctgcaagtggatatgtggacctctccgaagatgtctttggaaacgggaatatcttcacataaaaactaaacagaagcattctcagaaacttcttggtgatgtttgcattcaaatcccagagttgaaccttcctttgatagttcaggtttgaaacactctttttgtaggatctgcaagtggatatttggaccaatctgtggccttcgttcgaaacgggtatatcttcgcataaaatccagacagaagcattctcagaaaatactttgtgatgattgagtttaactcacagagctgaacattcctttggatggagcaggtttgagacacacatttgtagaatctacaagtggatatttggacctctctgaggatttcgttggaaacgcgataactgcacctaactaaacggaagcattctcagaaactgctttgtgatgattgcattcacctcacagagttgaacattcctattgatagagcagtttggaaacactcttgttgtggaatgtgcaagtggagatttggagcgctttgaggcctatggtagtaaagggaatagcttcatagaaaaactagacagatgcattctcaggaactttttggtgatgtttgtattcaactcccagagttgaactttcctttggaaagagcagctatgaaacactctttttctagaatctgcaagtggacgtttggagggctttgtggtttgtggtggaaaaggaaatatcttcacctaaatactagatagaagcattctcagaagcttctctgtgatgactgcattcaactcacggagttgaacactccttttgagagcgcagttttgaaactctctttctgtggcatctgcaaggggacatgtagacctctttgaagatttcgttggaaacggaatcatcttcacataaaaactatacagaagcagtctcagaatcttctttgtgatgtttgcattcaaatcccagagttgaactttcctttcaaagttcacgtttgaaacactctttttgcaggatctacaagtggatatttggaccactctgtgtccttcgttcgaaacgggtatatcttcacacgacatctagacagaagctttctcagaaaattctttgggatgattgagtggaactcacagagctgaacattccttgcgatgtagcagtttagaaacacactttctgcagaatctgcaagtgcatatttggacctctctgaggaattcgttggaaacgggataatttcagctgactaaacagacattctcagaaccttcttcgtgatgtctgcattcaactcacagtgtggaacctttctttgatagttcaggtttgaaacactctttttgtagaaactgcaaggggataattgcacttctttgaggcctaccgtagtaaaggaaataacttcctatagaaagaagacagaagcattctcagaaccctcttcgtgatgtttgcattcaactcacagtgctgaacctttctttgatagttcagctttgaaacactctttttgtagaaactgcaagtggatatttgatcctctctgaggatttcgttggaaacgggataaaccgcacagaactaaacagaagcattctcagaaccttcttcgtgatgtttgcattcaactcacagtgttgaacctttctttgatagttcaggtttgaaacggtctttctgtagaaactgcaagtagatatttggacctctatgaggatttcgttggatacgtgataaaccgcacagaactaaaacagaggcattcacagaaaactcttggtgacgactgagtttaactcacagagctgaacatccctttggatggagcagtttggaaacacactatttgtagaatgtgcaagtggatattggggcctctctgaggatttcgttggaaacgggataaaccgcacagaaataaacagaagcattctcagaaactactttgtgatgattgcattcaagtcacagagttgaacattccctttgacagagcagtttggaaactctctttgtgtagaatctgcaagtggagatatggaccgctttgaggactatgatagtaaaggaaatagcttcatataaaagctagacagtagaattctcagaaacttctttgtgatgcttgcattcaactcacagagttgaaatttcctttcgagagagaagctttgaaacactctttttccagaatctgcaagtggacatttggagggctttgaggcctgtggtggaaaaggaattatcttcccgcaaaagctagatagaagcattgtcagaaacttctttgtgatgattgcattcaactcacagagttgaaggttccttttcaaacagcagtttccaatcactctttctgtggaatctgcaagtggatatttggagctctttgaagatttccttggaaacgggagaatcttcacagaaaagctaaacagaagcattctcagaaacttctctgtgatgtttgtgttcaactcccagagtgtcacattgcttctcatagagtagttctgaaacatgcttttcgtagtgtctgcaagtggacatttggagcgctttcaggcctgtggtggaaaacgaattatggtcacataaaaactggagagaagccttctcagaaacttctctgtgatgattgcattcaactcacagatttgaaccctccctatggatagagcattgttgaaactctctttttgtggaatctgcaagtggatatgtggacctctccgaagatgtctttggaaacgggaatatcttcacataaaaactaaacagaagcattctcagaaacttcttggtgatgtttgcattcaaatcccagagttgaaccttcctttgatagttcaggtttgaaacactctttttgtaggatctgcaagtggatatttggaccactctgtggccttcgttcgaaacgggtatatcttcgcataaaatctagacagaagcattctcagaaaatactttgtgatgattgagtttaactcacagagctgaacattcctttggatggagcaggtttgagacacactttttgtagaatctacaagtggatatttggacctctctgaggatttcgttggaaacgggataactgcacctaactaaacggaagcattctcagaaactgctttgtgatgattgcattcacctcacagagttgaacattcctattgatagagcagtttggaaacactcttgttgtggaatgtgcaagtggagatttggagcgctttgaggcctatggtagtaaagggaatagcttcatagaaaaactagacagatgcattctcaggaactttttggtgatgtttgtattcaactcccagagttgaactttcctttggaaagagcagctatgaaacactctttttctagaatctgcaagtggacgtttggagggctttgtggtttgtggtggaaaaggaaatatcttcacctaaatactagatagaagcattctcagaagcttctctgtgatgactgcattcaactcacggagttgaacactccttttgagagcgcagttttgaaactctctttctgtggcatctgcaaggggacatgtagacctctttgaagatttcgttggaaacggaatcatcttcacataaaaactatacagaagcagtctcagaatcttctttgtgatgtttgcattcaaatcccagagttgaactttcctttcaaagttcacgtttgaaacactctttttgcaggatctacaagtggatatttggaccactctgtgtccttcgttcgaaacgggtatatcttcacacgacatctagacagaagctttctcagaaaattctttgggatgattgagtggaactcacagagctgaacattccttgcgatgtagcagtttagaaacacactttctgcagaatctgcaagtgcatatttggacctctctgaggaattcgttggaaacgggataatttcagctgactaaacagaagcattctcagaaccttcttcgtgatgtctgcattcaactcacagtgtggaacctttctttgatagttcaggtttgaaacactctttttgtagaaactgcaaggggataattgcacttctttgaggcctaccgtagtaaaggaaataacttcctatagaaagaagacagaagcattctcagaaccctcttcgtgatgtttgcattcaactcacagtgctgaacctttctttgatagttcagctttgaaacactcttcttgtagaaactgcaagtggatatttggtcctctctgaggatttcgttggaaacgggataaaccgcccagaactaaacagaagcattctcagagccctcttcgtgatgtttgcattcaactcacagtgctgaacctttctttgatagtgcagctttgaaacactctttttgtagaaactgcaagtggatgtttggtcctctctgaggatttcgttggaaacgggataaaccgcacagaactaaaacagaagcattgtcagaaacttctttgtgatgattgcattcaactcacagagttgaaggttccttttcaaacagcagtttccaatcactctttctgtggaatctgcaagtggatatttgggcctctctgaggatttcgttggaaacgggataaaacgcacagaactaaaacagaagcattctcagaaacttctctgtgatgtttgtgttcaactcccagagtttcacgttgcttttcatagagtagttctgaaacatgcttttcgtagtgtctgcaagtggacatttggagcgctttcaggcctgtggtggaaaacgaattatggtcacataaaaactggagagaagccttctcagaaacttctctgtgatgattgcattcaactcacagagttgaaccctcctatggatagagcagtgttgaaactctctttttgtggaatctgcaagtggatatgtggacctctccgaagatgtctttggaaacgggaatatcttcacataaaaactaaacagaagcattctcagaaacttcttggtgatgtttgcattcaaatcccagagttgaaccttcctttgatagttcaggtttgaaacactctttttgtaggatctgcaagtggctatttggaccactctgtggccttcgttcgaaacgggtatatcttcgcataaaatctagacagaagcattctcagaaaatactttgtgatgattgagtttaaatcacagagctgaccattcctttggatggagcaggtttgagacacactttttgtagaatctacaagtggatatttggacctctctgaggatttcgttggaaacgggataactgcacctaactaaacggaagcattctcagaaactgctttgtgatgattgcattcacctcacagagttgaacattcctattgatagagcagtttggaaacactcttgttgtggaatgtgcaagtggagatttggagcgctttgaggcctatggtagtaaagggaatagcttcatagaaaaactagacagatgcattctcaggaactttttggtgatgtttgtattcaactcccagagttgaactttcctttggaaagagcagctatgaaacactctttttctagaatctgcaagtggacgtttggagggctttgtggtttgtggtggaaaaggaaatatcttcacctaaatactagatagaagcattctcagaagcttctctgtgatgactgcattcaactcacggagttgaacactccttttgagagcgcagttttgaaactctctttctgtggcatctgcaaggggacatgtagacctctttgaagatttcgttggaaacggaatcatcttcacataaaaactatacagaagcagtctcagaatcttctttgtgatgtttgcattcaaatcccagagttgaactttcctttcaaagttcacgtttgaaacactctttttgcaggatctacaagtggatatttggaccactctgtgtccttcgttcgaaacgggtatatcttcacatggcatctagacagaagctttctcagaaaatcctttgggatgattgagtggaactcacagagctgaacattccttgcgatgtagcagtttagaaacacactttctgcagaatctgcaagtgcatatttggacctctccgaggaattcgttggaaacgggataatttcagctgactaaacagaagcattctcagaaccttcttcgtgatgtctgcattcaactcacagtgtggaacctttctttgatagttcaggtttgaaacactctttttgtagaaactgcaaggggataattgcacttctttgaggcctaccgtagtaaaggaaataacttcctatagaaagaagacagaagcattctcagaaccctcttcgtgatgtttgcattcaactcacagtgctgaacctttctttgatagttcagctttgaaacactcttcttgtagaaactgcaagtggatatttggtcctctctgaggatttcgttggaaacgggataaaccgcacagaactaaacagaagaattctcagagccctcttcgtgatgtttgcattcaactcacagtgctgaacctttctttgatagtgcagctttgaaacactctttttgtagaaactgcaagtggatgtttggtcctctctgaggatttcgttggaaacgggataaaccgcacagaactaaaacagaagcattgtcagaaacttctttgtgatgattgcattcaactcacagagttgaaggttccttttcaaacagcagtttccaatcactctttctgtggaatctgcaagtggatatttgggcctctctgaggatttcgttggaaacgggataaaacgcacagaactaaaacagaagcattctcagaaacttctctgtgatgtttgtgttcaactcccagagtttcacgttgcttttcatagagtagttctgaaacatgcttttcgtagtgtctgcaagtggacatttggagcgctttcaggcctgtggtggaaaacgaattatggtcacataaaaactggagagaagccttctcagaaacttctctgtgatgattgcattcaactcacagagttgaaccctcctatggatagagcagtgttgaaactctctttttgtggaatctgcaagtggatatgtggacctctccgaagatgtctttggaaacgggaatatcttcacataaaaactaaacagaagcattctcagaaacttcttggtgatgtttgcattcaaatcccagagttgaaccttcctttgatagttcaggtttgaaacactctttttgtaggatctgcaagtggctatttggaccactctgtggccttcgttcgaaacgggtatatcttcgcataaaatctagacagaagcattctcagaaaatactttgtgatgattgagtttaaatcacagagctgaccattcctttggatggagcaggtttgagacacactttttgtagaatctacaagtggatatttggacctctctgaggatttcgttggaaacgggataactgcacttaactaaacggaagcattctcagaaactgctttgtgatgattgcattcacctcacagagttgaacattcctattgatagagcagtttggaaacactcttgttgtggaatgtgcaagtggagatttggagcgctttgaggcctatggtagtaaagggaatagcttcatagaaaaactagacaggatgcattctcaggaactttttggtgatgtttgtattcaactcccagagttgaactttcctttggaaagagcagctatgaaacactctttttctagaatctgcaagtggacgtttggagggctttgtggtttgtggtggaaaaggaaatatcttcacctaaatactagacagaagcattctcagaagcttctctgtgatgactgcattcaactcacggagttgaacactccttttgagagcgcagttttgaaactctctttctgtggcatctgcaaggggacatgtagacctctttgaagatttcgttggaaacggaatcatcttcacataaaaactatacagaagcagtctcagaatcttctttgtgatgtttgcattcaaatcccagagttgaactttcctttcaaagttcacgtttgaaacactctttttgcaggatctacaagtggatatttggaccactctgtgtccttcgttcgaaacgggtatatcttcacaggacatctagacagaagctttctcagaaaattctttgggatgattgagtggaactcacagagctgaacattccttgcgatggagcagtttagaaacacactttctgcagaatctgcaagtgcatatttggacctctctgaggaattcgttggaaacgggataatttcagctgactaaacagaagcattctcagaaccttcttcgtgatgtctgcattcaactcacagtgtggaacctttctttgatagttcaggtttgaaacactctttttgtagaaactgcaaggggataattgcacttctttgaggcctaccgtagtaaaggaaataacttcctatagaaagaagacagaagcattctcagaaccctcttcgtgatgtttgcattcaactcacagtgctgaacctttctttgatagttcagctttgaaacactcttcttgtagaaactgcaagtggatatttggtcctctctgaggatttcgttggaaacgggataaaccgcacagaactaaacagaagcattctcagaaccttcttcgtgatgtttgcattcaactcacagtgttgaacctttctttgatagttcaggtttgaaacggtctttctgtagaaactgcaagtagatctttggacctctctgaggatttcgttggaaacgggataaaccgcacagaactaaaacagaagcattcacagaaaactcttggtgacgactgagtttaactcacagagctgaacattcctttggatggagcagtttcgaaacacactatttgtagaatgtgcaagtggatatttgggcctctctgaggatttcgttggaaacgggataaaccgcacagaactaaacagaagcattctcagaaactactttgtgatgattgcattcaagtcacagagttgaacattccctttgacagagcattttggaaactctctttgtgtagaatctgcaagtggagatatggaccgctttgaggcctatggtagtaaaggaaatagcttcatataaaagctagacagtagcattctcagaaacttctttgtgatgcttgcattcaactcacagagttgaactttcctttcgagagagaagctttgaaacactctttttccagaatctgcaagtggacatttggagggctttgaggcctgtggtggaaaaggaattatcttcccgtaaaagctagatagaagcattgtcagaaacttctttgtgatgattgcattcaactcacagagttgaaggttccttttcaaagagcagtttccaatcactctttgtgtggaatctgcaagtggatatttggacctattttgaagatttcgttggaaacgggagaatcttcacaggaaagctaaacagaagcattctcagaaacttctctgtgatgtttgtgttcaactcccagagtttcacattgcttttcatagagtagttctgaaacatgcttttcgtagtgtctacaagtggacatttggagcgctttcaggcctgtggtggaaaacgaattatggtcacataaaaactggagagaagccttctcagaaacttctctgtgatgattgcattcaactcacagagttgaaccctcctatggatagagcagtgttgaaactctctttttgtggaatctgcaagtggatatgtggacctctccgaagatgtctttggaaacgggaatatcttcacataaaaactaaacagaagcattctcagaaacttcttggtgatgtttgcattcaaatcccagagttgaaccttcctttgatagttcaggtttgaaacactctttttgtaggatctgcaagtggatatttggaccactctgtggccttcgttcgaaacgggtatatcttcgcataaaatctagacagaaagcattctcagaaaatactttgtgatgattgagtttaactcacagagctgaacattcctttggatggagcaggtttgagacacactttttgtagaatctacaagtggatatttggacctctctgaggatttcgttggaaacgggataactgcacctaactaaacggaagcattctcagaaactgctttgtgatgattgcattcacctcacagagttgaacattcctattgatagagcagtttggaaacactcttgttgtggaatgtgcaagtggagatttggagcgctttgaggcctatggtagtaaagggaatagcttcatagaaaaactagacagatgcattctcaggaactttttggtgatgtttgtattcaactcccagagttgaactttcctttggaaagagcagctatgaaacactctttttctagaatctgcaagtggacgtttggagggctttgtggtttgtggtggaaaaggaaatatcttcacctaaatactagatagaagcatcctcagaagcttctctgtgatgactgcattcaactcacggagttgaacactccttttgagagcgcagttttgaaactctctttctgtggcatctgcaaggggacatgtagacctctttgaagatttcgttggaaacggaatcatcttcacataaaaactatacagaagcagtctcagaatcttctttgtgatgtttgcattcaaatccccgagttgaactttcctttcaaagttcacgtttgaaacactctttttgcaggatctacaagtggatatttggaccactctgtgtccttcgttcgaaacgggtatatcttcacatgaaatctagacagaagctttctcagaaaattctttgggatgattgagttgaactcacagagctgagcattccttgcgatgtagcagtttagaaacacactttctgcagaatctgcaagtgcatatttggacctctgtgaggaattcgttggaaacgggataatttcagctgactaaacagaagcattctcagaaccttcttcgtgatgtctgcattcaactcacagtgtggaacctttctttgatagttcaggtttgaaacactctttctgtagaaactgcaaggggataattgcactctttgaggagtaccgtagtaaaggaaataacttcctataaaaagaagacagaagcattctcagaaccctcttcgtgatgtttgcattcaactcacagtgctgaacctttctttgatagttcagctttgaaacactctttttgtagaaactgcaagtggatatttggtcctctctgaggatttcgttggaaacgggataaactgcacagaactaaacagaagcattctcaggaaccttcttcgtgatgtttgcattcaactcacagtgttgaacctttctttgatagttcaggtttgaaacggtctttctgtagaaactgcaagtagatatttggacctctctgaggatttcgttggaaacgggataacccgcacagaactaaaacagaagcattcacagaaaactcttggtgacgactgagtttaactcacagagctgaacattcctttggatggagcagtttcgaaacacactatttgtagaatgtgcaagtggatatgtgggcctctctgaggatttcgttggaaacgggataaaccgcacagaactaaacagaagcattctcagaaactactttgtgatgatttcattcaagtcacagagttgaacattccctttgacagagcagtttggaaactctctttgtgtagaatctgcaagtggagatatggaccgctttgaggcctatggtagtaaaggaaatagcttcatataaaagctagacagtagcattctcagaaacttctttgtgatgcttgcattcaactcacagagttgaactttcctttcgagagagaagctttgaaacagtctttttccagaatctgcaagtggacatttggagggctttgaggcctgtggtggaaaaggaattatcttcccgtaaaagctagatagaagcattgtcagaaacttctttgtgatgattgcattcaagtcacagagttgaaggttccttttcaaagagcagtttccaatcactctttctgtggaatctgcaagtggatatttggacctctttgaagatttcgttggaaacgggagaatcttcacagaaaagctaaacagaagcattctcagaaacttctctgtgatgtttgtgttcaactcccagagtttcacattgcttctcatagagtagttctgaaacatgcttttcgtagtgtctgcaagtggacatttggagcgctttcaggcctgtggtggaaaacgaattatggtcacatgaaaactggagagaagccttctcagaaacttctctgtgatgattgcattcaactcacagagttgaaccctcctatggatagagcagtgttgaaactctctttttgtggaatctgcaagcggatatatggacctctccgaagatgtctttggaaacgggaatatcttcacataaaaactaaacagaagcattctcagaaacttcttggtgatgtttgcattcaaatcccagagttgaaccttcctttgatagttcaggtttgaaacactctttctgtaggatctgcaagtggctatttggaccactctgtggccttcgttcgaaacgggtatatcttcgcataaaatctagacagaagcattctcagaaaatactttgtgatgattgagtttaaatcacagagctgaccattcctttggatggagcaggtttgagacacactttttgtagaatctacaagtggatatttggacctctctgaggatttcgttggaaacgggataactgcacctaactaaacggaagcattctcagaaactgctttgtgatgattgcattcacctcacagagttgaacattcctattgatagagcagtttggaaacactcttgttgtggaatgtgcaagtggagatttggagcgctttgaggcctatggtagtaaagggaatagcttcatagaaaaactagacagatgcattctcaggaactttttggtgatgtttgtattcaactcccagagttgaactttcctttggaaagagcagctatgaaacactctttttctagaatctgcaagtggacgtttggagggctttgtggtttgtggtggaaaaggaaatatcttcacctaaatactagatagaagctttctcagaagcttctctgtgatgactgcattcaactcacggagttgaacactccttttgagagcgcagttttgaaactccctttctgtggcatctgcaaggggacatgtagacctctttgaagatttcgttggaaacggaatcatcttcacataaaaactatacagaagtagtctcagaatcttctttgtgatgtttgcattcaaatcccagagttgaactttcctttcaaagttcacgtttgaaacactctttttgcaggatctacaagtggatatttggaccactctgtgtccttcgttcgaaacgggtatatcttcacacgacatctaggcagaagctttctcagaaaattctttgggatgattgagttgaactcacagagctgaacattccttgcgatgtagcagtttagaaacacactttctgcagaatctgcaagtgcatatttggacctctctgaggaattcgttggaaacgggataatttcagctgactaaacagaagcattctcagaaccttcttcgtgatgtctgcattcaactcacagtgtggaacctttctttgatagttcaggtttgaaacactctttttgtagaaactgcaaggggataattgcactgctttgaggcctaccgtagtaaaggaaataacttcctataaaaagaagacagaagcattctcagaaccctcttcgtgatgtttgcattcaactcacagtgctgaacctttctttgatagttcagctttgaaacactcttcttgtagaaactgcaagtggatatttggtcctctctgaggatttcgttggaaacgggataaaccgcacagaactaaacagaagaattctcagagccctcttcgtggtgtttgcattcaactcacagtgctgaacctttctttgatagtgcagctttgaaacactctttttgtagaaactgcaagtggatatttggtcctctctgaagatttcgttggaaacgggataaaccgcacagaactaaaacagaagcattcacagaaaactcttggtgacgactgagtttaactcacagagctgaacattcctttggatggagcagtttcgaaacacactatttgtagaatctgcaagtggatatttgggcctctctgaggatttcgttggaaacgggataaaacgcacagaactaaaacagaagcattctcagaaactactttgtgatgattgcattcaagtcacagagttgaacattccctttgacagagcagtttggaaactctctttgtgtagaatctgcaagtggagatatggaccactttgaggcctatggtagtaaaggaaatagcttcatataaaagctagacagtagcattctcagaaacttctttgtgatgcttgcattcaactcacagagttgaactttcctttcgagagagaagctttgaaacactctttttccagaatgtgcaagtggacatttggggagctttgaggcctgtggtggaaaaggaattatcttcccgtaaaagctagatagaagcattgtcagaaacttctttgtgatgattgcattcaactcacagagttgaaggttccttttcaaacagcagtttacaatcactctttctgtggaatctgcaagtggatatttcgacctctttgaagatttcgttggaaacgggagaatcttcacagaaaagctaaacagaagcattctcagaaacttctctgtgatgtttgtgttcaactcccagagtttcacgttgcttttcatagagtagttctgaaacatgcttttcgtagtgtctgcaagtggacatttggagcgctttcaggcctgtggtggaaaacgaattatggtcacataaaaactggagagaagccttctcagaaacttctctgtgatgattgcattcaactcacagagttgaaccctcctatggatagagcagtgttgaaactctctttttgtggaatctgcaagtggatatgtggacctctccgaagatgtctttggaaacgggaatatcttcacataaaaactaaacagaagcattctcagaaacttcttggtgatgtttgcattcaaatcccagagttgaaccttcctttgatagttcaggtttgaaacactctttctgtaggatctgcaagtggctatttggaccactctgtggccttcgttcgaaacgggtatatcttcgcataaaatctagacagaagcattctcagaaaatactttgtgatgattgagtttaaatcacagagctgaccattcctttggatggagcaggtttgagacacactttttgtagaatctacaagtggatatttggacctctctgaggatttcgttggaaacgggataactgcacctaactaaacggaagcattctcagaaactgctttgtgatgattgcattcacctcacagagttgaacattcctattgatagagcagtttggaaacactcttgttgtggaatgtgcaagtggagatttggagcgctttgaggcctgtggtagtaaagggaatagcttcatagaaaaactagacagatgcattctcaggaactttttggtgatgtttgtattcaactcccagagttgaactttcctttggaaagagcagctatgaaacactctttttctagaatctgcaagtggacgtttggagggctttgtggtttgtggtggaaaaggaaatatcttcacctaaatactagatagaagcattctcagaagcttctctgtgatgactgcattcaactcacggagttgaacactccttttgagagcgcagttttgaaactctctttctgtggcatctgcaaggggacatgtagacctctttgaagatttcgttggaaacggaatcatcttcacataaaaactatacagaagcagtctcagaatcttctttgtgatgtttgcattcaaatcccagagttgaactttcctttcaaagttcacgtttgaaacactctttttgcaggatctacaagtggatatttggaccactctgtgtccttcgttcgaaacgggtatatcttcacacgacatctagacagaagctttctcagaaaattctttgggatgattgagtggaactcacagagctgaacattccttgcgatggagcagtttagaaacacactttctgcagaatctgcaagtgcatatttggacctctctgaggaattcgttggaaacgggataatttcagctgactaaacagaagcattctcagaaccttcttcgtgatgtctgcattcaactcacagtgtggaacctttctttgatagttcaggtttgaaacactctttttgtagaaactgcaaggggataattgcacttctttgaggcctaccgtagtaaaggaaataacttcctatagaaagaagacagaagcattctcagaaccctcttcgtgatgtttgcattcaactcacagtgctgaacctttctttgatagttcagctttgaaacactcttcttgtagaaactgcaagtggatatttggtcctctctgaggatttcgttggaaacgggataaaccgcacagaactaaacagaagaattctcagagccctcttcgtgatgtttgcattcaactcacagtgctgaacctttctttgatagtgcagctttgaaacactctttttgtagaaactgcaagtggatgtttggtcctctctgaggatttcattggaaacgggataaaccgcacagaactaaaacagaagcattgtcagaaacttctttgtgatgattgcattcaactcacagagttgaaggttccttttcaaacagcagtttccaatcactctttctgtggaatctgcaagtggatatttgggcctctctgaggatttcgttggaaacgggataaaacgcacagaactaaaacagaagcattctcagaaacttctctgtgatgtttgtgttcaactcccagagtttcacgttgcttttcatagagtagttctgaaacatgcttttcgtagtgtctgcaagtggacatttggagcgctttcaggcctgtggtggaaaacgaattatggtcacataaaaactggagagaagccttctcagaaacttctctgtgatgattgcattcaactcacaggagttgaaccctcctatggatagagcagtgttgaaactctctttttgtggaatctgcaagtggatatgtggacctctccgaagatgtctttggaaacgggaatatcttcacataaaaactaaacagaagcattctcagaaacttcttggtgatgtttgcattcaaatcccagagttgaaccttcctttgatagttcaggtttgaaacactctttctgtaggatctgcaagtggctatttggaccactactgtggccttcgttcgaaacgggtatatcttcgcataaaatctagacagaagcattctcagaaaatactttgtgatgattgagtttaaatcacagagctgaccattcctttggatggagcaggtttgagacacactttttgtagaatctacaagtggatatttggacctctctgaggatttcgttggaaacgggataactgcacctaactaaacggaagcattctcagaaactgctttgtgatgattgcattcacctcacagagttgaacattcctattgatagagcagtttggaaacactcttgttgtggaatgtgcaagtggagatttggagcgctttgaggcctatggtagtaaagggaatagcttcatagaaaaactagacagatgcattctcaggaactttttggtgatgtttgtattcaactcccagagttgaactttcctttggaaagagcagctatgaaacactctttttctagaatctgcaagtggacgtttggagggctttgtggtttgtggtggaaaaggaaatatcttcacctaaatactagatagaagcatcctcagaagcttctctgtgatgactgcattcaactcacggagttgaacactccttttgagagcgcagttttgaaactctctttctgtggcatctgcaaggggacatgtagaactctttgaagatttcgttggaaacggaatcatcttcacataaaaactatacagaagcagtctcagaatcttctttgtgatgtttgcattcaaatccccgagttgaactttcctttcaaagttcacgtttgaaacactctttttgcaggatctacaagtggatatttggaccactctgtgtccttcgttcgaaacaggtatatcttcacatgacatctagacagaagctttctcagaaaattctttgggatgattgagttgaactcacagagctgagcattccttgcgatgtagcagtttagaaacacactttctgcagaatctgcaagtgcatatttggacctctctgaggaattcgttggaaacgggataatttcagctgaccaaacagaagcattctcagaaccttcttcgtgatgtctgcgttcaactcacagtgtagaacctttctttgatagttcaggtttgaaacactcttttcgtagaaactgcaaggggatcattgcactctttgaggagtaccgtagtaaaggaaataacttcctataaaaagaagacagaagaattctcagagccctcttcgtgatgtttgcattcaactcacagtgctgaacctttctttgatagtgcagctttgaaacactctttttgtagaaactgcaagtggatgtttggtcctctctgaggatttcgttggaaacgggataaaccgcacagaactaaaacagaagcattgtcagaaacttctttgtgatgattgcattcaactcacagagttgaaggttccttttcaaacagcagtttccaatcactctttctgtggaatctgcaagtggatatttgggcctctctgaggatttcgttggaaacgggataaaacgcacagaactaaaacagaagcattctcagaaacttctctgtgatgtttgtgttcaactcccagagtttcaccgttgcttttcatagagtagttctgaaacatgcttttcgtagtgtctgcaagtggacatttggagcgctttcaggcctgtggtggaaaacgaattatggtcacataaaaactggagagaagccttctcagaaacttctctgtgatgattgcattcaactcacagagttgaaccctcctatggatagagcagtgttgaaactctctttttgtggaatctgcaagtggatatgtggacctctccgaagatgtctttggaaacgggaatatcttcacataaaaactaaacagaagcattctcagaaacttcttggtgatgtttgcattcaaatcccagagttgaaccttcctttgatagttcaggtttgaaacactctttctgtaggatctgcaagtggctatttggaccactctgtggccttcgttcgaaacgggtatatcttcgcataaaatctagacagaagcattctcagaaaatactttgtgatgattgagtttaaatcacagagctgaccattcctttggatggagcaggtttgagacacactttttgtagaatctacaagtggatatttggacctctctgaggatttcgttggaaacgggataactgcacctaactaaacggaagcattctcagaaactgctttgtgatgattgcattcacctcacagagttgaacattcctattgatagagcagtttggaaacactcttgttgtggaatgtgcaagtggagatttggagcgctttgaggcctatggtagtaaagggaatagcttcatagaaaaactagacagatgcattctcaggaactttttggtgatgtttgtattcaactcccagagttgaactttcctttggaaagagcagctatgaaacactctttttctagaatctgcaagtggacgtttggagggctttgtggtttgtggtggaaaaggaaatatcttcacctaaatactagatagaaagcattctcagaagcttctctgtgatgactgcattcaactcacggagttgaacactccttttgagagcgcagttttgaaactctctttctgtggcatctgcaaggggacatgtagacctctttgaagatttcgttggaaacggaatcatcttcacataaaaactatacagagcagtctcagaatcttctttgtgatgtttgcattcaaatcccagagttgaactttcctttcaaagttcacgtttgaaacactctttttgcaggatctacaagtggatatttggaccactcctgtgtccttcgttcgaaacgggtatatcttcacacgacatctagacagaagctttctcagaaaattctttgggatgattgagtggaactcacagagctgaacattccttgcgatgtagcagtttagaaacacactttctgcagaatctgcaagtgcatatttggacctctctgaggaattcgttggaaacgggataatttcagctgactaaacagaagcattctcagaaccttcttcgtgatgtctgcattcaactcacagtgtggaacctttctttgatagttcaggtttgaaacactctttttgtagaaactgcaaggggataattgcacttctttgaggcctaccgtagtaaaggaaataacttcctatagaaagaagacagaagcattctcagaaccctcttcgtgatgtttgcattcaacgcacagtgctgaacctttctttgatagtgcagctttgaaacactctttttgtagaaactgcaagtggatatttggtcctctctgaggatttcgttggaaacgggataaaccgcacagaactaaacagaagaattctcagagccctcttcgtgatgtttgcattcaactcacagtgctgaacctttctttgatagtgcagctttgaaacactctttttgtagaaactgcaagtggatgtttggtcctctctgaggatttcgttggaaacgggataaaccgcacagaactaaaacagaagcattgtcagaaacttctttgtgatgattgcattcaactcacagagttgaaggttccttttcaaacagcagtttccaatcactctttctgtggaatctgcaagtggatatttgggcctctctgaggatttcgttggaaacgggataaaacgcacagaactaaaacagaagcattctcagaaacttctctgtgatgtttgtgttcaactcccagagtttcacgttgcttttcatagagtagttctgaaacatgcttttcgtagtgtctgcaagtggacatttggagcgctttcaggcctgtggtggaaaacgaattatggtcacataaaaactggagagaagccttctcagaaacttctctgtgatgattgcattcaactcacagagttgaaccctcctatggatagagcagtgttgaaactctctttttgtggaatctgcaagtggatatgtggacctctccgaagatgtctttggaaacgggaatatcttcacataaaaactaaacagaagcattctcagaaaacttcttggtgatgtttgcattcaaatcccagagttgaaccttcctttgatagttcaggtttgaaacactctttctgtaggatctgcaagtggctatttggaccactctgtggccttcgttcgaaacgggtatatcttcgcataaaatctagacagaagcattctcagaaaatactttgtgatgattgagtttaaatcacagagctgaccattcctttggatggagcaggtttgagacacactttttgtagaatctacaagtggatatttggacctctctgaggatttcgttggaaacgggataactgcacctaactaaacggaagcattctcagaaactgctttgtgatgattgcattcacctcacagagttgaacattcctattgatagagcagtttggaaacactcttgttgtggaatgtgcaagtggagatttggagcgctttgaggcctatggtagtaaagggaatagcttcatagaaaaactagacagatgcattctcaggaactttttggtgatgtttgtattcaactcccagagttgaactttcctttggaaagagcagctatgaaacactctttttctagaatctgcaagtggacgtttggagggctttgtggtttgtggtggaaaaggaaatatcttcacctaaatactagatagaagcattctcagaagcttctctgtgatgactgcattcaactcacggagttgaacactccttttgagagcgcagttttgaaactctctttctgtggcatctgcaaggggacatgtagacctctttgaagatttcgttggaaacggaatcatcttcacataaaaactatacagaagcagtctcagaatcttctttgtgatgtttgcattcaaatcccagagttgaactttcctttcaaagttcacgtttgaaacactctttttgcaggatctacaagtggatatttggaccactctgtgtccttcgttcgaaacgggtatatcttcacacgacatctagacagaagctttctcagaaaattctttgggatgattgagtggaactcacagagctgaacattccttgcgatgtagcagtttagaaacacactttctgcagaatctgcaagtgcatatttggacctctctgaggaattcgttggaaacgggataatttcagctgactaaacagaagcattctcagaaccttcttcgtgatgtctgcattcaactcacagtgtggaacctttctttgatagttcaggtttgcaacactctttttgtagaaactgcaaggggataattgcacttctttgaggcctaccgtagtaaaggaaataacttcctatagaaagaagacagaagcattctcagaaccctcttcgtgatgtttgcattcaactcacagtgctgaacctttctttgatagttcagctttgaaacactcttcttgtagaaactgcaagtggatatttggtcctctctgaggatttcgttggaaacgggataaaccgcacagaactaaacagaagaattctcagagccctcttcgtgatgcttgcattcaactcacagtgctgaacctttctttgatagtgcagctttgaaacactctttttgtagaaactgcaagtggatatttggtcctctctgaggatttcgttggaaacgggataaaccgcacagaactaaaacagaagcattgtcagaaacttctttgtgatgattgcattcaactcacagagttgaaggttccttttcaaacagcagtttccaatcactctttctgtggaatctgcaagtggatatttgggcctctctgaggatttcgttggaaacgggataaaacgcacagaactaaaacagaagcattctcagaaacttctctgtgatgtttgtgttcaactcccagagtttcacgttgcttttcatagagtagttctgaaacatgcttttcgtagtgtctgcaagtggacatttggagcgctttcaggcctgtggtggaaaacgaattatggtcacataaaaactggagagaagccttctcagaaacttctctgtgatgattgcattcaactcacagagttgaaccctcctatggatagagcagtgttgaaactctctttttgtggaacctgcaagtggatatgtggacctctccgaagatgtctttggaaacgggaatatcttcacataaaaactaaacagaagcattctcagaaacttcttggtgatgtttgcattcaaatcccagagttgaaccttcctttgatagttcaggtttgaaacactctttctgtaggatctgcaagtggctatttggaccactctgtggccttcgttcgaaacgggtatatcttcgcataaaatctagacagaagcattctcagaaaatactttgtgatgattgagtttaaatcacagagctgaccattcctttggatggagcaggtttgagacacactttttgtagaatctacaagtggatatttggacctctctgaggatttcgttggaaacgggataactgcacctaactaaacggaagcattctcagaaactgctttgtgatgattgcattcacctcacagagttgaacattcctattgatagagcagtttggaaacactcttgttgcggaatgtgcaagtggagatttggagcgctttgaggcctgtggtagtaaagggaatagcttcatagaaaaactagacagatgcattctcaggaactttttggtgatgtttgtattcaactcccagagttgaactttcctttggaaagagcagctatgaaacactctttttctagaatctgcaagtggacgtttggagggctttgtggtttgtggtggaaaaggaaatatcttcacctaaatactagatagaagcattctcagaagcttctctgtgatgactgcattcaactcacggagttgaacactccttttgagagcgcagttttgaaactctctttctgtggcatctgcaaggggacatgtagacctctttgaagatttcgttggaaacggaatcatcttcacataaaaactatacagaagcagtctcagaatcttctttgtgatgtttgcattcaaatcccagagttgaactttcctttcaaagttcacgtttgaaacactctttttgcaggatctacaagtggatatttggaccactctgtgtccttcgttcgaaacgggtatatcttcacacgacatctagacagaagctttctcagaaaattctttgggatgattgagtggaactcacagagctgaacattccttgcgatgtagcagtttagaaacacactttctgcagaatctgcaagtgcatatttggacctctctgaggaattcgttggaaacgggataatttcagctgactaaacagaagcattctcagaaccttcttcgtgatgtctgcattcaactcacagtgtggaacctttctttgatagttcaggtttgaaacactctttttgtagaaactgcaaggggataattgcacttctttgaggcctaccgtagtaaaggaaataacttcctatagaaagaagacagaagcattctcagaaccctcttcgtgatgtttgcattcaactcacagtgctgaacctttctttgatagttcagctttgaaacactcttcttgtagaaactgcaagtggatatttggtcctctctgaggatttcgttggaaacgggataaaccgcacagaactaaacagaagaattctcagagccctcttcgtgatgtttgcattcaactcacagtgctgaacctttctttgatagtgcagctttgaaacactctttttgtagaaactgcaagtggatgtttggtcctctctgaggatttcgttggaaacgggataaaccgcacagaactaaaacagaagcattgtcagaaacttctttgtgatgattgcattcaactcacagagttgaaggttccttttcaaacagcagtttccaatcactctttctgtggaatctgcaagtggatatttgggcctctctgaggatttcgttggaaacgggataaaacgcacagaactaaaacagaagcattctcagaaacttctctgtgatgtttgtgttcaactcccagagtttcacgttgcttttcatagagtagttctgaaacatgcttttcgtagtgtctgcaagtggacatttggagcgctttcaggcctgtggtggaaaacgaattatggtcacataaaaactggagagaagccttctcagaaacttctctgtgatgattgcattcaactcacagagttgaaccctcctatggatagagcagtgttgaaactctctttttgtggaacctgcaagtggatatgtggacctctccgaagatgtctttggaaacgggaatatcttcacataaaaactaaacagaagcattctcagaaacttcttggtgatgtttgcattcaaatcccagagttgaaccttcctttgatagttcaggtttgaaacactctttctgtaggatctgcaagtggctatttggaccactctgtggccttcgttcgaaacgggtatatcttcgcataaaatctagacagaagcattctcagaaaatactttgtgatgattgagtttaaatcacagagctgaccattcctttggatggagcaggtttgagacacactttttgtagaatctacaagtggatatttggacctctctgaggatttcgttggaaacgggataactgcacctaactaaacggaagcattctcagaaactgctttgtgatgattgcattcacctcacagagttgaacattcctattgatagagcagtttggaaacactcttgttgtggaatgtgcaagtggagatttggagcgctttgaggcctatggtagtaaagggaatagcttcatagaaaaactagacagatgcattctcaggaactttttggtgatgtttgtattcaactcccagagttgaactttcctttggaaagagcagctatgaaacactctttttctagaatctgcaagtggacgtttggagggctttgtggtttgtggtggaaaaggaaatatcttcacctaaatactagatagaagcattctcagaagcttctctgtgatgactgcattcaactcacggagttgaacactccttttgagagcgcagttttgaaactctctttctgtggcatctgcaaggggacatgtagacctctttgaagatttcgttggaaacggaatcatcttcacataaaaactatacagaagcagtctcagaatcttctttgtgatgtttgcattcaaatcccagagttgaactttcctttcaaagttcacgtttgaaacactctttttgcaggatctacaagtggatatttggaccactctgtgtccttcgttcgagacgggtatatcttcacacgacatctagacagaagctttctaagaaaattctttggaatgattgagtggaactcacagagctgaacattccttgcgatgtagcagtttagaaacacactttctgcagaatctgcaagtgcatatttggacctctctgaggaattcgttggaaacgggataatttcagctgactaaacagaagcattctcagaaccttcttcgtgatgtctgcattcaactcacagtgtggaacctttctttgatagttcaggtttgaaacactctttttgtagaaactgcaaggggataattgcacttctttgaggcctaccgtagtaaaggaaataacttcctatagaaagaagacagaagcattctcagaaccctcttcgtgatgtttgcattcaactcacagtgctgaacctttctttgatagttcagctttgaaacactcttcttgtagaaactgcaagtggatatttggtcctctctgaggatttcgttggaaacgggataaaccgcagagaactaaacagaagcgttctcagaaccctcttcgtgatgtttgcattcaactcacagtgctgaacctttctttgatagtgcagctttgaaacactctttttgtagaaactgcaagtggatatttggtcctctctgaggatttcgttggaaacgggataaaccgcacggaactaaaacggaagcattctcagagccctcttcgtgatgtttgcattcaactcacagtgctgaacctttctttgatagtgcagctttgaaacactctttttgtagaaactgcaagtggatatttggtcctctctgaggatttcgttggaaacgggataaaccgcacagaactaaaacagaagcattcacagaaaactcttggtgacgactgagtttaactcacagagctgaacattcctttggatggagcagtttcgaaacacactatttgtagaatctgcaagtggatatttgggcctctctgaggatttcgttggaaacgggataaaccgcacagaactaaaacagaagcattctcagaaactactttgtgatgattgcattcaagtcacagagttgaacattccctttgacagagcagtttggaaactctctttgtgtagaatctgcaagtggagatatggaccgctttgaggcctatggtagtaaaggaaatagcttcatataaaagctagacagtagcattctcagaaacttctttgtgatgcttgcattcaactcacagagttgaactttcctttcgagagagaagctttgaaacactctttttccagaatctgcaagtggacatttggagggctttgaggcctgtggtggaaaaggaattatcttcccgtaaaagctagatagaagcattgtcagaaacttctctgtgatgattgcattcaactcacagagttgaaggttccttttcaaagagcagtttccaatcactctttctgtggaatctgcaagtggatatttggacctattttgaagatttcgttggaaacgggagaatcttcacaggaaagctaaacagaagcattctcagaaacttctctgtgatgtttgtgttcaactcccagagtttcacattgcttttcatagagtagttctgaaacatgcttttcgtagtgtctacaagtggacatttggagcgctttcaggcctgtggtggaaaacgaattatggtcacataaaaactggagagaagccttctcagaaacttctctgtgatgattgcattcaactcacagagttgaaccctcctatggatagagcagtgttgaaactctctttttgtggaatctgcaagtggatacgtggacctctccgaagatgtctttggaaacgggaatatcttcacataaaaactaaacagaagcattctcagaaacttcttggtgatgtttgcattcaaatcccagagttgaaccttcctttgatagttcaggtttgaaacactctttttgtaggatctgcaagtggatatttggaccactctgtggcccttcgttcgaaacgggtacatcttcgcataatatctagacagaagcattctcagaaaatactttgtgatgattgagtttaaatcacagagctgaccattcctttggatggagcaggtttgagacacactttttgtagaatctacaagtggatatttggacctctctgaggatttcgttggaaacgggataactgcacctaactaaacggaagcattctcagaaactgctttgtgatgattgcattcacctcacagagttgaacattcctattgatagagcagtttggaaacactcttgttgtggaatgtgcaagtggagatttggagcgctttgaggcctatggtagtaaagggaatagcttcatagaaaaactagacagatgcattctcaggaaccttttggtgatgtttgtattcaactcccagagttgaactttcctttggaaagagcagctatgaaacactctttttctagaatctgcaagtggacgtttggagggctttgtggtttgtggtggaaaaggaaatatcttcacctaaatactagatagaagcattctcagaagcttctctgtgatgactgcattcaactcacggagttgaacactccttttgagagcgcagttttgaaactctctttctgtggcatctgcaaggggacatgtagacctctttgaagatttcgttggaaacggaatcatcttcacataaaaactatacagaagcagtctcagaatcttctttgtgatgtttgcattcaaatcccagagttgaactttcctttcaaagttcacgtttgaaacactctttttgcaggatctacaagtggatatttggaccactctgtgtccttcgttcgaaacgggtatatcttcacacgacatctagacagaagctttctcagaaaattctttgggatgattgagtggaactcacagagctgaacattccttgcgatgtagcagtttagaaacacactttctgcagaatctgcaagtgcatatttggacctctctgaggaattcgttggaaacgggataatttcagctgactaaacagaagcattctcagaaccttcttcgtgatgtctgcattcaactcacagtgtggaacctttctttgatagttcaggtttgaaacactctttttgtagaaacctcaaggggataattgcacttctttgaggcctaccgtagtaaaggaaataacttcctatagaaagaagacagaagcattctcagaaccctcttcgtgatgtttgcattcaactcacagtgctgaaactttctttgatagttcagttttgaaacactcttcttgtagaaactgcaagtggatatttggtcctctctgaggatttcgttggaaacgggataaaccgcacagaactaaacagaagcattcacagaaaactcttggtgatgactgagtttaactcacagagctgaacattcctttggatggagcagtttcgaaacacactatttgtagaatctgcaagtggatatgtgggcctctctgaggatttcgttggaaacaggataaaccgcccagaactaaaacagaagcattctcagaaactactttgtgatgattgcattgaagtcacagagctgaacattccctttgacagagcagtttggaaactctctttgtgtagaatctgcaagtggagatatggaatgctttgaggactatggtagtaaaggaaatagcttcatataaaagctagacagtagcattctcagaaacttctttgtgatgcttgcattcaactcacagagttgaactttcctttcgagagagaagctttgaaacactctttttccagaatctgcaagtggacatttggagggctttgaggcctgtggtggaaaaggaattatcttcccgtaaaagctagatagaagcattgtcagaaacttctttgtgatgattgcattcaactcacagagttgaaggttccttttcaaagagcagtttccaatcactctttctgtggaatctgcaagtggatatttggacctattttgaagatttcgttggaaacgggagaatcttcacaggaaagctaaacagaagcattctcagaaacttctctgtgatgtttgtgttcaactcccagagtttcacattgcttttcatagagtagttctgaaacatgcttttcgtagtgtctacaagtggacatttggagcgctttcaggcctgtggtggaaaacgaattatggtcacataaaaactggagagaagccttctcagaaacttctctgtgatgattgcattcaactcacaggagttgaaccctcctatggatagagcagtgttgaaactctctttttgtggaatctgcaagtggatatgtggacctctccgaagatgtctttggaaacgggaatatcttcacataaaaactaaacagaagcattctcagaaacttcttggtgatgtttgcattcaaatcccagagttgaaccttcctttgatagttcaggtttgaaacactctttctgtaggatctgcaagtggctatttggaccactactgtggccttcgttcgaaacgggtatatcttcgcataaaatctagacagaagcattctcagaaaatactttgtgatgattgagtttaaatcacagagctgaccattcctttggatggagcaggtttgagacacactttttgtagaatctacaagtggatatttggacctctctgaggatttcgttggaaacgggataactgcacctaactaaacggaagcattctcagaaactgctttgtgatgattgcattcacctcaccagagttgaacattcctattgatagagcagtttggaaacactcttgttgtggaatgtgcaagtggagatttggagcgctttgaggcctatggtagtaaagggaatagcttcatagaaaaactagacagatgcattctcaggaactttttggtgatgtttgtattcaactcccagcagttgaactttcctttggaaagagcagctatgaaacactctttttctagaatctggaagtggacgtttggagggctttgtggtttgtggtggaaaaggaaatatcttcacctaaatactagatagaagcattctcagaagcttctctgtgatgactgcattcaactcacggagttgaacactccttttgagagcgcagttttgaaactctgtttctgtggcatctgcaaggggacatgtagacctctttgaggatttcgttggaaacggaatcatcttcacatcaaaactatacagaagcagtctcagaatcttctttgtgatgtttgcattcaaatcccagagttgaactttcctttcaaagttcacgtttgaaacactctttttgcaggatctacaagtggatatttggaccactctgtgtccttcgttcgaaaagggtatatcttcacatgacatctagacagaagctttctcagaaaattctttgggatgattgagttgaactcacagagctgaacattccttgcgatggagcagtttagaaacacactttctgcagaatctgcaagtgcatatttggacctctctgaggaattcgttggaaacgggataatttcagctgactaaacagaagcattctcagaaccttcttcgtgatgtctgcattcaactcacagtgtggaacctttctttgatagttcaggtttgaaacactctttttgtagaaactgcaaggggataattgcacttctttgaggcctaccgtagtaaaggaaataacttcctataaaaagaagacagaagcattctcagaaccctcttcgtgatgtttgcattcaactcacagtgctgaacctttctttgatagttcagctttgaaacactcttcttgtagaaactgcaagtggatatttggtcctctctgaggatttcgttggaaacgggataaaccgcacagaactaaacagaagaattctcagagccctcttcgtgatgtttgcattcaactcacagtgctgaacctttctttgatagtgcagctttgaaacactctttttgtagaaactgcaagtggatgtttggtcctctctgaggatttcgttggaaacgggataaaccgcacagaactaaaacagaagcattgtcagaaacttctttgtgatgattgcattcaactcacagagttgaaggttccttttcaaacagcagtttccaatcactctttctgtggaatctgcaagtggatatttgggcctctctgaggatttcgttggaaacgggataaaacgcacagaactaaaacagaagcattctcagaaacttctcagtgatgtttgtgttcaactcccagagtgtcacattgcttctcatagagcagttctgaaacatgcttttcgtagtgtctgcaagtggacatttggagcgctttcaggcctgtggtggaaaacgaattatggtcacataaaaactggagagaagccttctcagaaacttctctgtgatgattgcattcaactcacagagttgaaccctcctatggatagagcagtgttgaaactctctttttgtggaatctgcaagtggatatgtggacctctccgaagatgtctttggaaacgggaatatcttcacataaaaactaaacagaagcattctcagaaacttcttggtgatgtttgcattcaaatcccagagttgaaccttcctttgatagttcaggtttgaaacactctttctgtaggatctgcaagtggctatttggaccactctgtggccttcgttcgaaacgggtatatcttcgcataaaatctagacagaagcattctcaggaaaatactttgtgatgattgagtttaaatcacagagctgaccattcctttggatggagcaggtttgagacacactttttgtagaatctacaagtggatatttggacctctctgaggatttcgttggaaacgggataactgcacctaactaaacggaagcattctcagaaactgctttgtgatgattgcattcacctcacagagttgaacattcctattgatagagcagtttggaaacactcttgttgtggaatgtgcaagtggagatttggagcgctttgaggcctatggtagtaaagggaatagcttcatagaaaaactagacagatgcattctcaggaactttttggtgatgtttgtattcaactcccagagttgaactttcctttggaaagagcagctatgaaacactctttttctagaatctgcaagtggacgtttggagggctttgtggtttgtggtggaaaaggaaatatcttcacctaaatactagatagaagcattctcagaagcttctctgtgatgactgcattcaactcacggagttgaacactccttttgagagcgcagttttgaaactctctttctgtggcatctgcaaggggacatgtagacctctttgaagatttcgttggaaacggaatcatcttcacataaaaactatacagaagcagtctcagaatcttctttgtgatgtttgcattcaaatcccagagttgaactttcctttcaaagttcacgtttgaaacactctttttgcaggatctacaagtggatatttggaccactctgtgtccttcgttcgaaacgggtatatcttcacacgacatctagacagaagctttctcagaaaattctttgggatgattgagtggaactcacagagctgaacattccttgcgatgtagcagtttagaaacacactttctgcagaatctgcaagtgcatatttggacctctctgaggaattcgttggaaacgggataatttcagctgactaaacagaagcattctcagaaccttcttcgtgatgtctgcattcaactcacagtgtggaacctttctttgatagttcaggtttgaaacactctttttgtagaaactgcaaggggataattgcacttctttgaggcctaccgtagtaaaggaaataacttcctatagaaagaagacagaagcattctcagaaccctcttcgtgatgtttgcattcaactcacagtgctgaacctttctttgatagttcagctttgaaacactcttcttgtagaaactgcaagtggatatttggtcctctctgaggatttcgttggaaacgggataaaccgcacagaactaaacagaagaattctcagagccctcttcgtgatgtttgcattcaactcacagtgctgaacctttctttgatagtgcagctttgaaacactctttttgtagaaactgcaagtggatgtttggtcctctctgaggatttcgttggaaacgggataaaccgcacagaactaaaacagaagcattgtcagaaacttctttgtgatgattgcattcaactcacagagttgaaggttccttttcaaacagcagtttccaatcactctttctgtggaatctgcaagtggatatttgggcctctctgaggatttcgttggaaacgggataaaacgcacagaactaaaacagaagcattctcagaaacttctctgtgatgtttgtgttcaactcccagagtttcacgttgcttttcatagagtagttctgaaacatgcttttcgtagtgtctgcaagtggacatttggagcgctttcaggcctgtggtggaaaacgaattatggtcacataaaaactggagagaagccttctcagaaacttctctgtgatgattgcattcaactcacagagttgaaccctcctatggatagagcagtgttgaaactctctttttgtggaacctgcaagtggatatgtggacctctccgaagatgtctttggaaacgggaatatcttcacataaaaactaaacagaagcattctcagaaacttcttggtgatgtttgcattcaaatcccagagttgaaccttcctttgatagttcaggtttgaaacactctttctgtaggatctgcaagtggctatttggaccactctgtggccttcgttcgaaacgggtatatcttcgcataaaatctagacagaagcattctcagaaaatactttgtgatgattgagtttaaatcacagagctgaccattcctttggatggagcaggtttgagacacactttttgtagaatctacaagtggatatttggacctctctgaggatttcgttggaaacgggataactgcacctaactaaacggaagcattctcagaaactgctttgtgatgattgcattcacctcacagagttgaacattcctattgatagagcagtttggaaacactcttgttgtggaatgtgcaagtggagatttggagcgctttgaggcctatggtagtaaagggaatagcttcatagaaaaactagacagatgcattctcaggaaccttttggtgatgtttgtattcaactcccagagttgaactttcctttggaaagagcagctatgaaacactctttttctagaatctgcaagtggacgtttggagggctttgtggtttgtggtggaaaaggaaatatcttcacctaaatactagatagaagcattctcagaagcttctctgtgatgactgcattcaactcacggagttgaacactccttttgagagcgcagttttgaaactctctttctgtggcatctgcaaggggacatgtagacctctttgaagatttcgttggaaacggaatcatcttcacataaaaactatacagaagcagtctcagaatcttctttgtgatgtttgcattcaaatcccagagttgaactttcctttcaaagttcacgtttgaaacactctttttgcaggatctacaagtggatatttggaccactctgtgtccttcgttcgaaacgggtatatcttcacacgacatctagacagaagctttctcagaaaattctttgggatgattgagtggaactcacagagctgaacattccttgcgatgtagcagtttagaaacacactttctgcagaatctgcaagtgcatatttggacctctctgaggaattcgttggaaacgggataatttcagctgactaaacagaagcattctcagaaccttcttcgtgatgtctgcattcaactcacagtgtggaacctttctttgatagttcaggtttgaaacactctttttgtagaaactgcaaggggataattgcacttctttgaggcctaccgtagtaaaggaaataacttcctatagaaagaagacagaagcgttctcagaaccctcttcgtgatgtttgcattcaactcacagtgctgaacctttctttgatagtgcagctttgaaacactctttttgtagaaactgcaagtggatatttggtcctctctgaggatttcgttggaaacgggataaaccgcacggaactaaaacggaagcattctcagaaccttcttcgtgatgtttgcattcaactcacagtgttgaacctttctttgatagttcaggtttgaaaccgtctttctgtagaaactccaagtagatatttggacctctctgaggatttcgttggaaacgggataaaccacacagaactaaaacagaagcattcacagaaaactcttggtgacgactgagtttaactcacatcgctgaacattcccttggttggagcagtttcgaaacacactctttgtagaatctgcaggtggatatttgggcctctctgaggatttcgttggaaacgggataaaccgcacagaactaaaacagaagcattctcagaaactactttgtgatgattgcattcaagtcacagagctgaacattccctttgacagagcagtttggaaactctctttgtgtagaatctgcaagtggagatatggaatgctttgaggactatggtagtaaaggaaatagcttcatataaaagctagacagtagcattctcagaaacttctttgtgatgcttgcattcaactcacagagttgaactttcctttcgagagagaagctttgaaacactctttttccagaatctgcaagtggacatttggagggctttgaggcctgtggtggaaaaggaattatcttcccgtaaaagctagatagaagcattgtcagaaacttctttgtgatgattgcattcaactcacagagttgaaggttccttttcaaacagcagtttccaaacaccctttctgtggaatctgcaagtggatgtttggacctcttggaagatttcgttggaaacgggagaatcttcacagaaaagctaaacagaagctttctcagaaacttctctgtgacgtttgtgttcaactcccagagtttcacattgcttttcatagagtagttctgaaacatgcttttcgtactgtctgcaagtggaggtttggagcgctttcagacctgtggtggaaaacgaattatggtcaaataaaaactggagagaagccttctcagaaacttctctgtgatgattgcattcaactcacagagttgaaccctcctatggatagagcagtgttgaaactctctttttgtggaatctgcaagtggatatgtggacctctccgaagatgtctttggaaacgggaatatcttcacataaaaactaaacagaagcattctcagaaacttcttggtgatgtttgcattcaaatcccagagtcgaaccttcctttgatagttcaggtttgaaacactctttttgtaggatctgcaagtggatatttggaccactctgtggccttcgttcgaaacgggtatatcttcgcataaaatctagacagaagcattctcagaatatactttgtgatgattgagtttaactcacagagctgaacattcctttggatggagcaggtttgagacacactttttgtagaatctacaagtggatatttggacctctctgaggatttcgttggaaacgggataactgcacctaactaaacggaagcattctcagaaactgctttgtgatgattgcattcacctcacagagttgaacattcctattgatagagcagtttggaaacactcttgttgtggaatgtgcaagtggagatttggagcgctttgaggcctatggtagtaaagggaatagcttcatagaaaaactagacagatgcattctcaggaactttttggtgatgtttgtattcaactcccagagttgaactttcctttggaaagagcagctatgaaacactctttttctagaatctgcaagtggacgtttggagggctttgtggtttgtggtggaaaaggaaatatcttcacctaaatactagatagaagcattctcagaagcttctctgtgatgactgcattcaactcacggagttgaacactccttttgagagcgcagttttgaaactctctttctgtggcatctgcaaggggacatgtagacctctttgaagatttcgttggaaacggaatcatcttcacataaaaactatacagaagcagtctcagaatcttctttgtgatgttagcattcaaatcccagagttgaactttcctttcaaagttcacgtttgaaacactctttttgcaggacatacaagtggatatttggaccactctgtgtccttcgttcgaaacgggtatatcttcacatgacatctagacagaagctttctcagaaaattctttgggatgattgagtggaactcacagagctgaacattccttgcgatgtagcagtttagaaacacactttctgcagaatctgcaagtgcatatttggacctctctgaggaattcgttggaaacgggataatttcagctgactaaacagaagcattctcagaaccttcttcgtgatgtctgcattcaactcacagtgtggaacctttctttgatagttcaggtttgaaacactctttttgtagaaactgcaaggggataattgcacttctttgaggcctaccgtagtaaaggaaataacttcctatagaaagaagacagaagcattctcagaaccctcttcgtgatgtttgcattcaactcacagtgctgaacctttctttgatagttcagctttgaaacactcttcttgtagaaactgcaagtggatatttggtcctctctgaggatttcgttggaaacgggataaaccgcacagaactaaacagaagaattctcagagccctcttcgtgatgtttgcattcaactcacagtgctgaacctttctttgatagtgcagctttgaaacactctttttgtagaaactgcaagtggatgtttggtcctctctgaggatttcgttggaaacgggataaaccgcacagaactaaaacagaagcattgtcagaaacttctttgtgatgattgcattcaactcacagagttgaaggttccttttcaaacagcagtttccaatcactctttctgtggaatctgcaagtggatatttgggcctctctgaggatttcgttggaaacgggataaaacgcacagaactaaaacagaagcattctcagaaacttctctgtgatgtttgtgttcaactcccagagtttcacgttgcttttcatagagtagttctgaaacatgcttttcgtagtgtctgcaagtggacatttggagcgctttcaggcctgtggtggaaaacgaattatggtcacataaaaactggagagaagccttctcagaaacttctctgtgatgattgcattcaactcacagagttgaaccctcctatggatagagcagtgttgaaactctctttttgtggaatctgcaagtggatatgtggacctctccgaagatgtctttggaaacgggaatatcttcacataaaaactaaacagaagcattctcagaaacttcttggtgatgtttccattcaaatcccagagttgaaccttcctttgatagttcaggtttgaaacactctttttgtaggatctgcaagtggctatttggaccactctgtggccttcgttcgaaacgggtatatcttcgcataaaatctagacagaagcattctcagaaaatactttgtgatgattgagtttaaatcacagagctgaccattcctttggatggagcaggtttgagacacactttttgtagaatctacaagtggatatttggacctctctgaggatttcgttggaaacgggataactgcacctaactaaacggaagcattctcagaaactgctttgtgatgattgcattcacctcacagagttgaacattcctattgatagagcagtttggaaacactcttgttgtggaatgtgcaagtggagatttggagcgctttgaggcctatggtagtaaagggaatagcttcatagaaaaactagacagatgcattctcaggaactttttggtgatgtttgtattcaactcccagagttgaactttcctttggaaagagcagctatgaaacactctttttctagaatctgcaagtggacgtttggagggctttgtggtttgtggtggaaaaggaaatatattcacctaaatactagatagaagcattctcagaagcttctctgtgatgactgcattcaactcacggagttgaacactccttttgagagcgcagttttgaaactctctttctgtggcatctgcaaggggacatgtagacctctttgaagatttcgttggaaacggaatcatcttcacttaaaaactatacagaagcagtctcagaatcttctttgtggtgtttgcattcaaatcccagagttgaactttcctttcaaagttcacgtttgaaacactctttttgcaggatctacaagtggatatttggaccactctgtgtccttcgttcgaaacgggtatatcttcacatgacatctagacagaagctttctcagaaaattctttgggatgattgagtggaactcacagagctgaacattccttgcgatgtagcagtttagaaacacactttctgcagaatctgcaagtgcatatttggacctctctgaggaattcgttggaaacgggataatttcagctgactaaacagaagcattctcagaaccttcttcgtgatgtctgcattcaactcacagtgtggaacctttctttgatagttcaggtttgaaacactctttttgtagaaactgcaaggggataattgcacttctttgaggcctaccgtagtaaaggaaataacttcctatagaaagaagacagaagcattctcagaaccctcttcgtgatgtttgcattcaactcacagtgctgaacctttctttgatagttcagctttgaaacactcttcttgtagaaactgcaagtggatatttggtcctctctgaggatttcgttggaaacgggataaaccgcacagaactaaacagaagaattctcagagccctcttcgtgatgtttgcattcaactcacagtgctgaacctttctttgatagtgcagctttgaaacactctttttgtagaaactgcaagtggatgtttggtcctctctgaggatttcgttggaaacgggataaaccgcacagaactaaaacagaagcattgtcagaaacttctttgtgatgattgcattcaactcacagagttgaaggttccttttcaaacagcagtttccaatcactctttctgtggaatctgcaagtggatatttgggcctctctgaggatttcgttggaaacgggataaaacgcacagaactaaaacagaagcattctcagaaacttctctgtgatgtttgtgttcaactcccagagtttcacgttgcttttcatagagtagttctgaaacatgcttttcgtagtgtctgcaagtggacatttggagcgctttcaggcctgtggtggaaaacgaattatggtcacataaaaactggagagaagccttctcagaaacttctctgtgatgattgcattcaactcacagagttgaaccctcctatggatagagcagtgttgaaactctctttttgtggaatctgcaagtggatatgtggacctctccgaagatgtctttggaaacgggaatatcttcacataaaaactaaacagaagcattctcagaaacttcttggtgatgtttgcattcaaatcccagagttgaaccttcctttgatagttcaggtttgaaacactctttctgtaggatctgcaagtggctatttggaccactctgtggccttcgttcgaaacgggtatatcttcgcataaaatctagacagaagcattctcagaaaatactttgtgatgattgagtttaaatcacagagctgaccattcctttggatggagcaggtttgagacacactttttgtagaatctacaagtggatatttggacctctctgaggatttcgttggaaacgggataactgcacctaactaaacggaagcattctcagaaactgctttgtgatgattgcattcacctcacagagttgaacattcctattgatagagcagtttggaaacactcttgttgtggaatgtgcaagtggagatttggagcgctttgaggcctatggtagtaaagggaatagcttcatagaaaaactagacagatgcattctcaggaactttttggtgatgtttgtattcaactcccagagttgaactttcctttggaaagagcagctatgaaacactctttttctagaatctgcaagtggacgtttggagggctttgtggtttgtggtggaaaaggaaatatcttcacctaaatactagatagaagcattctcagaagcttctctgtgatgactgcattcaactcacggagttgaacactccttttgagagcgcagttttgaaactctctttctgtggcatctgcaaggggacatgtagacctctttgaagatttcgttggaaacggaatcatcttcacataaaaactatacagaagcagtctcagaatcttctttgtgatgtttgcattcaaatcccagagttgaactttcctttcaaagttcacgtttgaaacactctttttgcaggatctacaagtggatatttggaccactctgtgtccttcgttcgaaacgggtatatcttcacacgacatctagacagaagctttctcagaaaattctttgggatgattgagtggaactcacagagctgaacattccttgcgatgtagcagtttagaaacacactttctgcagaatctgcaagtgcatatttggacctctctgaggaattcgttggaaacgggataatttcagctgactaaacagaagcattctcagaaccttcttcgtgatgtctgcattcaactcacagtgtggaacctttctttgatagttcaggtttgaaacactctttttgtagaaactgcaaggggataattgcacttctttgaggcctaccgtagtaaaggaaataacttcctatagaaagaagacagaagcattctcagaaccctcttcgtgatgtttgcattcaactcacagtgctgaacctttctttgatagttcagctttgaaacactcttcttgtagaaactgcaagtggatatttggtcctctctgaggatttcgttggaaacgggataaaccgcacagaactaaacagaagaattctcagagccctcttcgtgatgtttgcattcaactcacagtgctgaacctttctttgatagtgcagctttgaaacactctttttgtagaaactgcaagtggatgtttggtcctctctgaggatttcgttggaaacgggataaaccgcacagaactaaaacagaagcattgtcagaaacttctttgtgatgattgcattcaactcacagagttgaaggttccttttcaaacagcagtttccaatcactctttctgtggaatctgcaagtggatatttgggcctctctgaggatttcgttggaaacgggataaaacgcacagaactaaaacagaagcattctcagaaacttctctgtgatgtttgtgttcaactcccagagtttcacgttgcttttcatagagtagttctgaaacatgcttttcgtagtgtctgcaagtggacatttggagcgctttcaggcctgtggtggaaaacgaattatggtcacataaaaactggagagaagccttctcagaaacttctctgtgatgattgcattcaactcacagagttgaaccctcctatggatagagcagtgttgaaactctctttttgtggaatctgcaagtggatatgtggacctctccgaagatgtctttggaaacgggaatatcttcacataaaaactaaacagaagcattctcagaaacttcttggtgatgtttgcattcaaatcccagagttgaaccttcctttgatagttcaggtttgaaacactctttctgtaggatctgcaagtggctatttggaccactctgtggccttcgttcgaaacgggtatatcttcgcataaaatctagacagaagcattctcagaaaatactttgtgatgattgagtttaaatcacagagctgaccattcctttggatggagcaggtttgagacacactttttgtagaatctacaagtggatatttggacctctctgaggatttcgttggaaacgggataactgcacctaactaaacggaagcattctcagaaactgctttgtgatgattgcattcacctcacagagttgaacattcctattgatagagcagtttggaaacactcttgttgtggaatgtgcaagtggagatttggagcgctttgaggcctatggtagtaaagggaatagcttcatagaaaaactagacagatgcattctcaggaaccttttggtgatgtttgtattcaactcccagagttgaactttcctttggaaagagcagctatgaaacactctttttctagaatctgcaagtggacgtttggagggctttgtggtttgtggtggaaaaggaaatatcttcacctaaatactagatagaagcattctcagaagcttctctgtgatgactgcattcaactcacggagttgaacactccttttgagagcgcagttttgaaactctctttctgtggcatctgcaaggggacatgtagacctctttgaagatttcgttggaaacggaatcatcttcacataaaaactatacagaagcagtctcagaatcttctttgtgatgtttgcattcaaatcccagagttgaactttcctttcaaagttcacgtttgaaacactctttttgcaggatctacaagtggatatttggaccactctgtgtccttcgttcgaaacgggtatatcttcacacgacatctagacagaagctttctcagaaaattctttgggatgattgagtggaactcacagagctgaacattccttgcgatggagcagtttagaaacacactttctgcagaatctgcaagtgcatatttggacctctctgaggaattcgttggaaacgggataatttcagctgactaaacagaagcattctcagaaccttcttcgtgatgtctgcattcaactcacagtgtggaacctttctttgatagttcaggtttgaaacactctttttgtagaaactgcaaggggataattgaacttctttgaggcctaccgtagtaaaggaaataacttcctatagaaagaagacagaagcattctcagaaccctcttcgtgatgtttgcattcaactcacagtgctgaacctttctttgatagttcagctttgaaacactcttcttgtagaaactgcaagtggatatttggtcctctctgaggatttcgttggaaacgggataaaccgcacagaactaaacagaagaattctcagagccctcttcgtgatgtttgcattcaactcacagtgctgaacctttctttgatagtgcagctttgaaacactctttttgtagaaactgcaagtggatgtttggtcctctctgaggatttcgttggaaacgggataaaccgcacagaactaaaacagaagcattgtcagaaacttctttgtgatgattgcattcaactcacagagttgaaggttccttttcaaacagcagtttccaatcactctttctgtggaatctgcaagtggatatttgggcctctctgaggatttcgttggaaacgggataaaacgcacagaactaaaacagaagcattctcagaaacttctctgtgatgtttgtgttcaactcccagagtttcacgttgcttttcatagagtagttctgaaacatgcttttcgtagtgtctgcaagtggacatttggagcgctttcaggcctgtggtggaaaacgaattatggtcacataaaaactggagagaagccttctcagaaacttctctgtgatgattgcattcaactcacagagttgaaccctcctatggatagagcagtgttgaaactctctttttgtggaatctgcaagtggatatgtggacctctccgaagatgtctttggaaacgggaatatcttcacataaaaactaaacagaagcattctcagaaacttcttggtgatgtttgcattcaaatcccagagttgaaccttcctttgatagttcaggtttgaaacactctttctgtaggatctgcaagtggctatttggaccactctgtggccttcgttcgaaacgggtatatcttcgcataaaatctagacagaagcattctcagaaaatactttgtgatgattgagtttaaatcacagagctgaccattcctttggatggagcaggtttgagacacactttttgtagaatctacaagtggatatttggacctctctgaggatttcgttggaaacgggataactgcacctaactaaacggaagcattctcagaaactgctttgtgatgattgcattcacctcacagagttgaacattcctattgatagagcagtttggaaacactcttgttgtggaatgtgcaagtggagatttggagcgctttgaggcctatggtagtaaagggaatagcttcatagaaaaactagacagatgcattctcaggaactttttggtgatgtttgtattcaactcccagagttgaactttcctttggaaagagcagctatgaaacactctttttctagaatctgcaagtggacgtttggagggctttgtggtttgtggtggaaaaggaaatatcttcacctaaatactagatagaagcatcctcagaagcttctctgtgatgactgcattcaactcacggagttgaacactccttttgagagcgcagttttgaaactctctttctgtggcatctgcaaggggacatgtagacctctttgaagatttcgttggaaacggaatcatcttcacataaaaactatacagaagcagtctcagaatcttctttgtgatgtttgcattcaaatccccgagttgaactttcctttcaaagttcacgtttgaaacactctttttgcaggatctacaagtggatatttggaccactctgtgtccttcgttcgaaacgggtatatcttcacatgacatctagacagaagctttctcagaaaattctttgggatgattgagttgaactcacagagctgagcattccttgcgatgtagcagtttagaaacacactttctgcagaatctgcaagtgcatatttggacctctgtgaggaattcgttggaaacgggataatttcagctgactaaacagaagcattctcagaaccttcttcgtgatgtctgcattcatctcacagtgtggaacctttctttgataggtcaggtttgaaacactctttttgtagaaactgcaaggggataattgcactctttgaggagtaccgtagtaaaggaaataacttcctataaaaagaagacagaagcattctcagaaccttcttcgtgatgtttgcattcaactcacagtgctgaacctttctttgatagttcagctttgaaacactctttttgtagaaactgcaagtggataattgttcctctatgaggatttcgttggaaacgggataaactgcacagaactaaacagaagcattcacagaaaactcttggtgacgactgagtttaactcacagagctgaacattcctttggatggagcagtttcgaaacacactatttgtagaatctgcaagtggatatttgggcctctctgaggatttcgttggaaacgggataaaccgcacagaactaaaacagaagcattctcagaaactactttgtgatgattgcattcaagtcacagagttgaacattccctttgacagagcagtttggaaactctctttgtgtagaatctgcaagtggagatatggaccgctttgaggcctatggtagtaaaggaaatagcttcatataaaagctagacagtagcattctcagaaacttctttgtgatgcttgcattcaactcacagagttgaactttcctttcgagagagaagctttgaaacactctttttccagaatgttcaagtggatatttgcagggctttgaggcctgtggtggaaaaggaattatcttcccgtaaaagctagatagaagcattgtcagaaacttctttgagatgattgcattcaactcacagagttgaaggttccttttcaaacagcagtttccaatcactctttctgtggaatctgcaagtggatatttcgacctctttgaagatttcgttggaaacgggagaatcttcacagaaaagctaaacagaagcattctcagaaacttctctgtgatgtttgtgttcaactcccagagtttcacgttgcttttcatagagtagttctgaaacatgcttttcgtagtgtctgcaagtggacatttggagcgctttcaggcctgtggtggaaaacgaattatggtcacataaaaactggagagaagccttctcagaaacttctctgtgatgactgcattcaactcacagagttgaaccctcctatggatagagcagtgttgaaactctctttttgtggaatctgcaagtggatatgtggacctctccgaagatgtctttggaaacgggaatatcttcacataaaaactaaacagaagcattctcagaaacttcttggtgatgtttgcattcaaatcccagagttgaaccttcctttgatagttcaggtttgaaacactctttttgtaggatctgcaagtggctatttggaccactctgtggccttcgttcgaaacgggtatatcttcacataaaatctagacagaagcattctcagaaaatactttgtgatgattgagtttaaatcacagagctgaccattcctttggatggagcaggtttgagacacactttttgtagaatctacaagtggatatttggacctctctgaggatttcgttggaaacgggataactgcacctaactaaacggaagcattctcagaaactgctttgtgatgattgcattcacctcacagagttgaacattcctattgatagagcagtttggaaacactcttgttgtggaatgtgcaagtggagatttggagcgctttgaggcctatggtagtaaagggaatagcttcatagaaaaactagacagatgcattctcaggaactttttggtgatgtttgtattcaactcccagagttgaactttcctttggaaagagcagctatgaaacactctttttctagaatctgcaagtggacgtttggagggctttgtggtttgtggtggaaaaggaaatatcttcacctaaatactagatagaagcattctcagaagcttctctgtgatgactgcattcaactcacggagttgaacactccttttgagagcgcagttttgaaactctctttctgtggcatctgcaaggggacatgtagacctctttgaagatttcgttggaaacggaatcatcttcacataaaaactatacagaagcagtctcagaatcttctttgtgatgtttgcattcaaatcccagagttgaactttcctttcaaagttcacgtttgaaacactctttttgcaggatctacaagtggatatttggaccactctgtgtccttcgttcgaaacgggtatatcttcacacgacatctagacagaagctttctcagaaaattctttgggatgattgagtggaactcacagagctgaacattccttgcgatgtagcagtttagaaacacactttctgcagaatctgcaagtgcatatttggacctctctgaggaattcgttggaaacgggataatttcagctgactaaacagaagcattctcagaaccttcttcgtgatgtctgcattcaactcacagtgtggaacctttctttgatagttcaggtttgaaacactctttttgtagaaactgcaaggggataattgcacttctttgaggcctaccgtagtaaaggaaataacttcctatagaaagaagacagaagcattctcagaaccctcttcgtgatgtttgcattcaactcacagtgctgaacctttctttgatagttcagctttgaaacactcttcttgtagaaactgcaagtggatatttggtcctctctgaggatttcgttggaaacgggataaaccgcacagaactaaacagaagaattctcagagccctcttcgtgatgtttgcattcaactcacagtgctgaacctttctttgatagtgcagctttgaaacactctttttgtagaaactgcaagtggatatttggtcctctctgaggatttcgttggaaacgggataaaccgcacagaactaaaacagaagcattgtcagaaacttctttgtgatgattgcattcaactcacagagttgaaggttccttttcaaacagcagtttccaatcactctttctgtggaatctgcaagtggatatttgggcctctctgaggatttcgttggaaacgggataaaacgcacagaactaaaacagaagcattctcagaaacttctctgtgatgtttgtgttcaactcccagagtttcacgttgcttttcatagagtagttctgaaacatgcttttcgtagtgtctgcaagtggacatttggagcgctttcaggcctgtggtggaaaacgaattatggtcacaaaaaaactggagagaagccttctcagaaacttctctgtgatgattgcattcaactcacagagttgaaccctcctatggatagagcagtgttgaaactctctttttgtggaatctgcaagtggatatgtggacctctccgaagatgtctttggaaacgggaatatcttcacataaaaactaaacagaagcattctcagaaacttcttggtgatgtttgcattcaaatcccagagttgaaccttcctttgatagttcaggtttgaaacactctttctgtaggatctgcaagtggctatttggaccactctgtggccttcgttcgaaacgggtatatcttcgcataaaatctagacagaagcattctcagaaaatactttgtgatgattgagtttaaatcacagagctgaccattcctttggatggagcaggtttgagacacactttttgtagaatctacaagtggatatttggacctctctgaggatttcgttggaaacgggataactgcacctaactaaacggaagcattctcagaaactgctttgtgatgattgcattcacctcacagagttgaacattcctattgatagagcagtttggaaacactcttgttgtggaatgtgcaagtggagatttggagcgctttgaggcctgtggtagtaaagggaatagcttcatagaaaaactagacagatgcattctcaggaactttttggtgatgtttgtattcaactcccagagttgaactttcctttggaaagagcagctatgaaacactctttttctagaatctgcaagtggacgtttggagggctttgtggtttgtggtggaaaaggaaatatcttcacctaaatactagacagaagcattctcagaagcttctctgtgatgactgcattcaactcacggagttgaacactccttttgagagcgcagttttgaaactctctttctgtggcatctgcaaggggacatgtagacctctttgaagatttcgttggaaacggaatcatcttcacataaaaactatacagaagcagtctcagaatcttctttgtgatgtttgcattcaaatcccagagttgaactttcctttcaaagttcacgtttgaaacactctttttgcaggatctacaagtggatatttggaccactctgtgtccttcgttcgaaacgggtatatcttcacacgacatctagacagaagctttctcagaaaattctttgggatgattgagtggaactcacagagctgaacattccttgcgatgtagcagtttagaaacacactttctgcagaatctgcaagtgcatatttggacctctctgaggaattcgttggaaacgggataatttcagctgactaaacagaagcattctcagaaccttcttcgtgatgtctgcattcaactcacagtgtggaacctttctttgatagttcaggtttgaaacactctttttgtagaaactgcaaggggataattgcacttctttgaggcctaccatagtaaaggaaataacttcctatagaaagaagagagaagcattctcagaaccctcttcgtgatgtttgcattcaactcacagtgctgaacctttctttgatagttcagctttgaaacactcttcttgtagaaactgcaagtggatatttggtcctctctgaggatttcgttggaaacgggataaaccgcacagaactaaacagaagaattctcagagccctcttcgtgatgtttgcattcaactcacagtgctgaacctttctttgatagtgcagctttgaaacactctttttgtagaaactgcaagtggatatttggtcctctctgaggatttcgttggaaacgggataaaccgcacagaactaaaacagaagcattcacagaaaactcttggtgacgactgagtttaactcacagagctgaacattcctttggatggagcagtttcgaaacacactatttgtagaatctgcaagtggatatttgggcctctctgaggatttcgttggaaacgggataaaacgcacagaactaaaacagaagcattctcagaaactactttgtgatgattgcattcaagtcacagagttgaacattccctttgacagagcagtttggaaactctctttgtgtagaatctgcaagtggagatatggaccgctttgaggcctatggtagtaaaggaaatagcttcatataaaagctagacagtagcattctcagaaacttctttgtgatgcttgcattcaactcacagagttgaactttcctttcgagagagaagctttgaaacactctttttccagaatgtgcaagtggacatttggggagctttgaggcctgtggtggaaaaggaattatcttcccgtaaaagctagatagaagcattgtcagaaacttctttgagatgattgcattcaactcacagagttgaaggttccttttcaaacagcagtttccaatcactctttctgtggaatctgcaagtggatatttcgacctctttgaagatttcgttggaaacgggagaatcttcacagaaaagctaaacagaagcattctcagaaacttctctgtgatgtttgtgttcaactcccagagtttcacattgcttttcatagagtagttctgaaacatgcttttcgtagtgtctacaagtggacatttggagcgctttcaggcctgtggtggaaaacgaattatggtcacataaaaactggagagaagccttctcagaaacttctctgtgatgattgcattcaactcacagagttgaaccctcctatggatagagcagtgttgaaactctctttttgtggaatctgcaagtggatatgtggacctctccgaagatgtctttggaaacgggaatatcttcacataaaaactaaacagaagcattctcagaaacttcttggtgatgtttgcattcaaatcccagagttgaaccttcctttgatagttcaggtttgaaacactctttttgtaggatctgcaagtggatatttggaccactctgtggccttcgttcgaaacgggtacatcttcacataaaatctagacagaagcattctcagaaaatactttgtgatgattgagttgaactcacagagctgaacattcctttggatggagcaggtttgagacacactttttgtagaatctacaagtggatatttggacctctctgaggatttcgttggaaacgggataactgcacctaactaaacggaagcattctcagaaactgctttgtgatgattgcattcacctcacagagttgaacattcctattgatagagcagtttggaaacactcttgttgtggaatgtgcaagtggagatttggagcgctttgaggcctatggtagtaaagggaatagcttcatagaaaaactagacagatgcattctcaggaactttttggtgatgtttgtattcaactcccagagttgaactttcctttggaaagagcagctatgaaacactctttttctagaatctgcaagtggacgtttggagggctttgtggtttgtggtggaaaaggaaatatcttcacctaaatactagagagaagcattctcagaagcttctctgtgatgagtgcattcaactcacggagttgaacactccttttgagagcgcagttttgaaactctctttctgtggcatctgcaaggggacatgtagacctctttgaagatttcgttggaaacggaatcatcttcacataaaaactatacagaagcagtctcagaatcttctttgtgatgtttgcattcaaatcccagagttgaactttcctttcaaagttcacatttgaaacactctttttgcaggatctacaagtggatatttggaccactctgtgtccttcgttcgaaacgggtatatcttcacatgacatctagacagaagctttctcagaaaattctttgggatgattgagtggaactcacagagatgaacattccttgcgatgtagcagtttagaaacacactttctgcagaatctgcaagtgcatatttggacctctctgaggaattcgttggaaacgggataatttcagctgactaaacagaagcattctcagaaccttcttcgtgatgtctgcattcaactcacagtgtggaacctttctttgatagttcaggtttgaaacactctttttgtagaaactgcaaggggataattgcacttctttgaggcctaccgtagtaaaggaaataacttcctatagaaagaagacagaagcattctcagaaccctcttcgtgatgtttgcattcaactcacagtgctgaacctttctttgatagttcagctttgaaacactcttcttgtagaaactgcaagtggatatttggtcctctctgaggatttcgttggaaacgggataaaccgcacagaactaaacagaagaattctcagagccctcttcgtgatgtttgcattcaactcacagtgctgaacctttctttgatagtgcagctttgaaacactctttttgtagaaactgcaagtggatgtttggtcctctctgaggatttcgttggaaacgggataaaccgcacagaactaaaacagaagcattgtcagaaacttctttgtgatgattgcattcaactcacagagttgaaggttccttttcaaacagcagtttccaatcactctttctgtggaatctgcaagtggatatttgggcctctctgaggatttcgttggaaacgggataaaacgcacagaactaaaacagaagcattctcagaaacttctctgtgatgtttgtgttcaactcccagagtttcacgttgcttttcatagagtagttctgaaacatgcttttcgtagtgtctgcaagtggacatttggagcgctttcaggcctgtggtggaaaacgaattatggtcacataaaaactggagagaagccttctcagaaacttctctgtgatgattgcattcaactcacagagttgaaccctcctatggatagagcagtgttgaaactctctttttgtggaatctgcaagtggatatgtggacctctccgaagatgtctttggaaacgggaatatcttcacataaaaactaaacagaagcattctcagaaacttcttggtgatgtttgcattcaaatcccagagttgagccttcctttgatagttcaggtttgaaacactctttctgtaggatctgcaagtggctatttggaccactctgtggccttcgttcgaaacgggtatatcttcgcataaaatctagacagaagcattctcagaaaatactttgtgatgattgagtttaaatcacagagctgaccattcctttggatggagcaggtttgagacacactttttgtagaatctacaagtggatatttggacctctctgaggatttcgttggaaacgggataactgcacctaactaaacggaagcattctcagaaactgctttgtgatgattgcattcacctcacagagttgaacattcctattgatagagcagtttggaaacagtcttgttgtggaatgtgcaagtggagatttggagcgctttgaggcctatggtagtaaagggaatagcttcatagaaaaactagacagatgcattctcaggaaccttttggtgatgtttgtattcaactcccagagttgaactttcctttggaaagagcagctatgaaacactctttttctagaatctgcaagtggacgtttggagggctttgtggtttgtggtggaaaaggaaatatcttcacctaaatactagatagaagcattctcagaagcttctctgtgatgactgcattcaactcacggagttgaacactccttttgagagcgcagttttgaaactctctttctgtggcatctgcaaggggacatgtagacctctttgaagatttcgttggaaacggaatcatcttcacataaaaactatacagaagcagtctcagaatcttctttgtgatgtttgcattcaaatcccagagttgaactttcctttcaaagttcacgtttgaaacactctttttgcaggatctacaagtggatatttggaccactctgtgtccttcgttcgaaacgggtatatcttcacacgacatctagacagaagctttctcagaaaattctttgggatgattgagtggaactcagagagctgaacattccttgcgatgtagcagtttagaaacacactttctgcagaatctgcaagtgcatatttggacctctctgaggaattcgttggaaacgggataatttcagctgactaaacagaagcattctcagaaccttcttcgtgatgtctgcattcaactcacagtgtggaacctttctttgatagttcaggtttgaaacactctttttgtagaaactgcaaggggataattgcacttctttgaggcctaccgtagtaaaggaaataacttcctatagaaagaagacagaagcattctcagaaccctcttcgtgatgtttgcattcaactcacagtgctgaacctttctttgatagttcagctttgaaacactcttcttgtagaaactgcaagtggatatttggtcctctctgaggatttcgttggaaacgggataaaccgcacagaactaaacagaagaattctcagagccctcttcgtgatgtttgcattcaactcacagtgctgaacctttctttgatagtgcagctttgaaacactctttttgtagaaactgcaagtggatgtttggtcctctctgaggatttcgttggaaacgggataaaccgcacagaactaaaacagaagcattgtcagaaacttctttgtgatgattgcattcaactcacagagttgaaggttccttttcaaacagcagtttccaatcactctttctgtggaatctgcaagtggatatttgggcctctctgaggatttcgttggaaacgggataaaacgcacagaactaaaacagaagcattctcagaaacttctctgtgatgtttgtgttcaactcccagagtttcacgttgcttttcatagagtagttctgaaacatgcttttcgtagtgtctgcaagtggacatttggagcgctttcaggcctgtggtggaaaacgaattatggtcacataaaaactggagagaagccttctcagaaacttctctgtgatgattgcattcaactcacagagttgaaccctcctatggatagagcagtgttgaaactctctttttgtggaatctgcaagtggatatgtggacctctccgaagatgtctttggaaacgggaatatcttcacataaaaactaaacagaagcattctcagaaacttcttggtgatgtttgcattcaaatcccagagttgaaccttcctttgatagttcaggtttgaaacactctttctgtaggatctgcaagtggctatttggaccactctgtggccttcgttcgaaacgggtatatcttcgcataaaatctagacagaagcattctcagaaaatactttgtgatgattgagttaaaatcacagagctgaacattcctttggatggagcaggtttgagacacactttttgtagaatctacaagtggatatttggacctctctgaggatttcgttggaaacgggataactgcacctaactaaacggaaagcattctcagaaactgctttgtgatgattgcattcacctcacagagttgaacattcctattgatagagcagtttggaaacactcttgttgtggaatgtgcaagtggagatttggagcgctttgaggcctatggtagtaaagggaatagcttcatagaaaaactagacagtgcattctcaggaactttttggtgatgtttgtattcaactcccagagttgaactttcctttggaaagagcagctatgaaacactctttttctagaatctgcaagtggacgtttggagggctttgtggtttgtggtggaaaaggaaatatcttcacctaaatactagatagaagcattctcagaagcttctctgtgatgactgcattcaactcacggagttgaacactccttttgagagcgcagttttgaaactctctttctgtggcatccgcaaggggacatgtggacctctttgaagatttcgttggaaacggaatcatcttcacataaaaactatacagaagcagtctcagaatcttctttgtgatgtttgcattccaatcccagaattgaactttcctttcaaagttcacgtttgaaacactctttttgcaggatctacaagtggatatttggaccactctgtgtccttcgttcgaaacgggtatatcttcacatgacatctagacagaagctttctcagaaaattgtttgggatgattgacttgaactcacagagctgagcattccttgcgatgtagcagtttagaaacacactttctgcagaatctgcaagtgcatatttggacctctctgaggaattcgttggaaacgggataatttcagctgactaaacagaagcattctcagaaccttcttcgtgatgtctgcattcaactcacagtgtggaacctttccttgatagttcaggtttgaaacactctttttgtagaaactgcaaggggataattgcactctttgaggagtaccgtagtaaaggaaataacttcctctaaaaagaagacagaagcattctcagaaccctcttcgtgatgtttgcattcaactcacagtgctgaacctttctttgatagttcagctttgaaacactctttttgtagaaactgcaaatggatatttggtcctctctgaggatttcgttggaaaagggataaaacgcacagaactaaacagaagcattcacagaaaactcttggtgacgactgagtttaactcacagagctgaacattcctttggatggagcagtttcaaaacacactatttgtagaatctgcaagtggatatgtgggcctctctgaggatttcgttggaaacgggataaaccgcacagaactaaaacagaagcattctcagaaactactttgtgatgattgcattcaagtcacagagttgaacattccctttgagagagcagtttggaaactctctttgtgtagaatctgcaagtggagatatggaccgcgttgaggcctatggtagtaaaggaaatagcttcatataaaagctagacagtagcattctcagaaacttttttgtgatgcttgcattcaactcacagagttgaactttcctttcgagagagaagctttgaaacactctttttccagaatctgcaagtggacatttgaagggctttgaggcctgtggtggaaaaggaattatcttcccgtaaaagcctagatagaagcattgtcagaaacttctttgtgatgattgcattcaagtcacagagttgaaggttccttttcaaagagcagtttccaatcactctttctgtggaatctgcaagtggatatttggacctctttgaagatttcgttggaaacgggagaatcttcacagaaaagctaaacagaagcattctcagaaacttctctgtgatgtttgtgttcaactcccagagtttcacattgcttttcatagagtagttctgaaacatgcttttcgtagtgtctgcaagtggacatttggagcgctttcaggcctgtggtggaaaacgaattatggtcacataaaaactggagagaagccttctcagaaacttctctgtgatgattgcattcaactcacagagttgaaccctcctatggatagagcagtgttgaaactctctttttgtggaatctgcaagtggatatgtggacctctccgaagatgtctttggaaacgggaatatcttcacataaaaactaaacagaagcattctcagaaacttcttggtgatgtttgcattcaaatcccagagttgaaccttcctttgatagttcaggtttgaaacactctttctgtaggatctgcaagtggctatttggaccactctgtggccttcgttcgaaacgggtatatcttcgcataaaatctagacagaagcattctcagaaaatactttgtgatgattgagtttaaatcacagagctgaccattcctttggatggagcaggtttgagacacactttttgtagaatctacaagtggatatttggacctctctgaggatttcgttggaaacgggataactgcacctaactaaacggaagcattctcagaaactgctttgtgatgattgcattcacctcacagagttgaacattcctattgatagagcagtttggaaacactcttgttgtggaatgtgcaagtggagatttggagcgctttgaggcctgtggtagtaaagggaatagcttcatagaaaaactagacagatgcattctcaggaactttttggtgatgtttgtattcaactcccagagttgaactttcctttggaaagagcagctatgaaacactctttttctagaatctgcaagtggacgtttggagggctttgtggtttgtggtggaaaaggaaatatcttcacctaaatactagatagaagcattctcagaagcttctctgtgatgactgcattcaactcacggagttgaacactccttttgagagcgcagttttgaaactctctttctgtggcatctgcaaggggacatgtagacctctttgaagatttcgttggaaacggaatcatcttcacataaaaactatacagaagcagtctcagaatcttctttgtgatgtttgcattcaaatcccagagttgaactttcctttcaaagttcacgtttgaaacactctttttgcaggatctacaagtggatatttggaccactctgtgtccttcgttcgaaacgggtatatcttcacacgacatctagacagaagctttctcagaaaattctttgggatgattgagtggaactcacagagctgaacattccttgcgatgtagcagtttagaaacacactttctgcagaatctgcaagtgcatatttggacctctctgaggaattcgttggaaacgggataatttcagctgactaaacagaagcattctcagaaccttcttcgtgatgtctgcattcaactcacagtgtggaacctttctttgatagttcaggtttgaaacactctttttgtagaaactgcaaggggataattgcacttctttgaggcctaccgtagtaaaggaaataacttcctatagaaagaagacagaagcattctcagaaccctcttcgtgatgtttgcattcaactcacagtgctgaacctttctttgatagttcagctttgaaacactcttcttgtagaaactgcaagtggatatttggtcctctctgaggatttcgttggaaacgggataaaccgcacagaactaaacagaagaattctcagagccctcttcgtgatgtttgcattcaactcacagtgctgaacctttctttgatagtgcagctttgaaacactctttttgtagaaactgcaagtggatgtttggtcctctctgaggatttcgttggaaacgggataaaccgcacagaactaaaacagaagcattgtcagaaacttctttgtgatgattgcattcaactcacagagttgaaggttccttttcagacagcagtttccaatcactctttctgtggaatctgcaagtggatatttgggcctctctgaggatttcgttggaaacgggataaaacgcacagaactaaaacagaagcattctcagaaacttctctgtgatgtttgtgttcaactcccagagtttcacgttgcttttcatagagtagttctgaaacatgcttttcgtagtgtctgcaagtggacatttggagcgctttcaggcctgtggtggaaaacgaattatggtcacataaaaactggagagaagccttctcagaaacttctctgtgatgattgcattcaactcacagagttgaaccctcctatggatagagcagtgttgaaactctctttttgtggaacctgcaagtggatatgtggacctctccgaagatgtctttggaaacgggaatatcttcacataaaaactaaacagaagcattctcagaaacttcttggtgatgtttgcattcaaatcccagagttgaaccttcctttgatagttcaggtttgaaacactctttctgtaggatctgcaagtggctatttggaccactctgtggccttcgttcgaaacgggtatatcttcgcataaaatctagacagaagcattctcagaaaatactttgtgatgattgagtttaaatcacagagctgaccattcctttggatggagcaggtttgagacacactttttgtagaatctacaagtggatatttggacctctctgaggatttcgttggaaacgggataactgcacctaactaaacggaaagcattctcagaaactgctttgtgatgattgcattcacctcacagtagttgaacattcctattgatagagcagtttggaaacactcttgttgtggaatgtgcaagtggagatttggagcgctttgaggcctatggtagtaaagggaatagcttcatagaaaaactagacagatgcattctcaggaactttttggtgatgtttgtattcaactcccagagttgaactttcctttggaaagagcagctatgaaacactctttttctagaatctgcaagtggacgtttggagggctttgtggtttgtggtggaaaaggaaatatcttcacctaaatactagatagaagcattctcagaagcttctctgtgatgactgcattcaactcacggagttgaacactccttttgagagcgcagttttgaaactctctttctgtggcatctgcaaggggacatgtagacctctttgaagatttcgttggaaacggaatcatcttcacataaaaactatacagaagcagtctcagaatcttctttgtgatgtttgcattcaaatcccagagttgaactttcctttcaaagttcacgtttgaaacactctttttgcaggatctacaagtggatatttggaccactctgtgtccttcgtgcgaaacgggtatatcttcacatgacatctagacagaagctttctcagaaaattctttgggatgactgagtggaactcacagagctgaacattccttgcgatgtagcagtttagaaacacactttctgcagaatctgcaagtgcatatttggacctctctgaggaattcgttggaaacgggataatttcagctgactaaacagaagcattctcagaaccttcttcgtgatgtctgcattcaactcacagtgtggaacctttctttgatagttcaggtttgaaacactctttttgtagaaactgcaaggggataattgcacttctttgaggcctaccgtagtaaaggaaataacttcctatagaaagaagacagaagcattctcagaaccctcttcgtgatgtttgcattcaactcacagtgctgaacctttctttgatagttcagctttgaaacactcttcttgtagaaactgcaagtggatatttggtcctctctgaggatttcgttggaaacgggataaaccgcacagaactaaacagaagaattctcagagccctcttcgtgatgtttgcattcaactcacagtgctgaacctttctttgatagtgcagctttgaaacactctttttgtagaaactgcaagtggatgtttggtcctctctgaggatttcgttggaaacgggataaaccgcacagaactaaaacagaagcattgtcagaaacttctttgtgatgattgcattcaactcacagagttgaaggttccttttcaaacagcagtttccaatcactctttctgtggaatctgcaagtggatatttgggcctctctgaggatttcgttggaaacgggataaaacgcacagaactaaaacagaagcattctcagaaacttctctgtgatgtttgtgttcaactcccagagtttcacgttgcttttcatagagtagttctgaaacatgcttttcgtagtgtctgcaagtggacatttggagcgctttcaggcctgtggtggaaaacgaattatggtcacataaaaactggagagaagccttctcagaaacttctctgtgatgattgcattcaactcacagagttgaaccctcctatggatagagcagtgttgaaactctctttttgtggaatctgcaagtggatatgtggacctctccgaagatgtctttggaaacgggaatatcttcacataaaaactaaacagaagcattctcagaaacttcttggtgatgtttgcattcaaatcccagagttgaaccttcctttgatagttcaggtttgaaacactctttctgtaggatctgcaagtggctatttggaccactctgtggccttcgttcgaaacgggtatatcttcgcataaaatctagacagaagcattctcagaaaatactttgtgatgattgagtttaaatcacagagctgaccattcctttggatggagcaggtttgagacacactttttgtagaatctacaagtggatatttggacctctctgaggatttcgttggaaacgggataactgcacctaactaaacggaagcattctcagaaactgctttgtgatgattgcattcacctcacagagttgaacattcctattgatagagcagtttggaaacactcttgttgtggaatgtgcaagtggagatttggagcgctttgaggcctatggtagtaaagggaatagcttcatagaaaaactagacagatgcattctcaggaactttttggtgatgtttgtattcaactcccagagttgaactttcctttggaaagagcagctatgaaacactctttttctagaatctgcaagtggacgtttggagggctttgtggtttgtggtggaaaaggaaatatcttcacctaaatactagatagaagcattctcagaagcttctctgtgatgactgcattcaactcacggagttgaacactccttttgagagcgcagttttgaaactctctttctgtggcatctgcaaggggacatgtagacctctttgaagatttcgttggaaacggaatcatcttcacataaaaactatacagaagcagtctcagaatcttctttgtgatgtttgcattcaaatcccagagttgaactttcctttcaaagttcacgtttgaaacactctttttgcaggatctacaagtggatatttggaccactctgtgtccttcgttcgaaacgggtatatcttcacacgacatctagacagaagctttctcagaaaattctttgggatgattgagtggaactcacagagctgaacattccttgcgatggagcagtttagaaacacactttctgcagaatctgcaagtgcatatttggacctctctgaggaattcgttggaaacgggataatttcagctgactaaacagaagcattctcagaaccttcttcgtgatgtctgcattcaactcacagtgtggaacctttctttgatagttcaggtttgaaacactctttttgtagaaactgcaaggggataattgcacttctttgaggcctaccgtagtaaaggaaataacttcctatagaaagaagacagaagcattctcagaaccctcttcgtgatgtttgcattcaactcacagtgctgaacctttctttgatagttcagctttgaaacactcttcttgtagaaactgcaagtggatatttggtcctctctgaggatttcgttggaaacgggataaaccgcacagaactaaacagaagaattctcagagccctcttcgtgatgtttgcattcaactcacagtgctgaacctttctttgatagtgcagctttgaaacactctttttgtagaaactgcaagtggatgtttggtcctctctgaggatttcgttggaaacgggataaaccgcacagaactaaaacagaagcattgtcagaaacttctttgtgatgattgcattcaactcacagagttgaaggttccttttcaaacagcagtttccaatcactctttctgtggaatctgcaagtggatatttgggcctctctgaggatttcgttggaaacgggataaaacgcacagaactaaaacagaagcattctcagaaacttctctgtgatgtttgtgttcaactcccagagtttcacgttgcttttcatagagtagttctgaaacatgcttttcgtagtgtctgcaagtggacatttggagcgctttcaggcctgtggtggaaaacgaattatggtcacataaaaactggagagaagccttctcagaaacttctctgtgatgattgcattcaactcacagagttgaaccctcctatggatagagcagtgttgaaactctctttttgtggaatctgcaagtggatatgtggacctctccgaagatgtctttggaaacgggaatatcttcacataaaaactaaacagaagcattctcagaaacttcttggtgatgtttgcattcaaatcccagagttgaaccttcctttgatagttcaggtttgaaacactctttctgtaggatctgcaagtggctatttggaccactctgtggccttcgttcgaaacgggtatatcttcgcataaaatctagacagaagcattctcagaaaatactttgtgatgattgagtttaaatcacagagctgaccattcctttggatggagcaggtttgagacacactttttgtagaatctacaagtggatatttggacctctctgaggatttcgttggaaacgggataactgcacctaactaaacggaagcattctcagaaactgctttgtgatgattgcattcacctcacagagttgaacattcctattgatagagcagtttggaaacactcttgttgtggaatgtgcaagtggagatttggagcgctttgaggcctgtggtagtaaagggaatagcttcatagaaaaactagacagatgcattctcaggaactttttggtgatgtttgtattcaactcccagagttgaactttcctttggaaagagcagctatgaaacactctttttctagaatctgcaagtggacgtttggagggctttgtggtttgtggtggaaaaggaaatatcttcacctaaatactagatagaagcattctcagaagcttctctgtgatgactgcattcaactcacggagttgaacactccttttgagagcgcagttttgaaactctctttctgtggcatctgcaaggggacatgtagacctctttgaagatttcgttggaaacggaatcatcttcacataaaaactatacagaagcagtctcagaatcttctttgtgatgtttgcattcaaatcccagagttgaactttcctttcaaagttcacgtttgaaacactctttttgcaggatctacaagtggatatttggaccactctgtgtccttcgttcgaaacgggtatatcttcacacgacatctagacagaagctttctcagaaaattctttgggatgattgagtggaactcacagagctgaacattccttgcgatgtagcagtttagaaacacactttctgcagaatctgcaagtgcatatttggacctctctgaggaattcgttggaaacgggataatttcagctgactaaacagaagcattctcagaaccttcttcgtgatgtctgcattcaactcacagtgtggaacctttctttgatagttcaggtttgaaacactctttttgtagaaactgcaaggggataattgcacttctttgaggcctaccgtagtaaaggaaataacttcctatagaaagaagacagaagcattctcagaaccctcttcgtgatgtttgcattcaactcacagtgctgaacctttctttgatagttcagctttgaaacactcttcttgtagaaactgcaagtggatatttggtcctctctgaggatttcgttggaaacgggataaaccgcacagaactaaacagaagaattctcagagccctcttcgtgatgtttgcattcaactcacagtgctgaacctttctttgatagtgcagctttgaaacactctttttgtagaaactgcaagtggatgtttggtcctctctgaggatttcgttggaaacgggataaaccgcacagaactaaaacagaagcattgtcagaaacttctttgtgatgattgcattcaactcacagagttgaaggttccttttcaaacagcagtttccaatcactctttctgtggaatctgcaagtggatatttgggcctctctgaggatttcgttggaaacgggataaaacgcacagaactaaaacagaagcattctcagaaacttctctgtgatgtttgtgttcaactcccagagtttcacgttgcttttcatagagtagttctgaaacatgcttttcgtagtgtctgcaagtggacatttggagcgctttcaggcctgtggtggaaaacgaattatggtcacataaaaactggagagaagccttctcagaaacttctctgtgatgattgcattcaactcacagagttgaaccctcctatggatagagcagtgttgaaactctctttttgtggaatctgcaagtggatatgtggacctctccgaagatgtctttggaaacgggaatatcttcacataaaaactaaacagaagcattctcagaaacttcttggtgatgtttgcattcaaatcccagagttgaaccttcctttgatagttcaggtttgaaacactctttttgtaggatctgcaagtggctatttggaccactctgtggccttcgttcgaaacgggtatatcttcgcataaaatctagacagaagcattctcagaaaatactttgtgatgattgagttaaaatcacagagctgaacattcctttggatggagcaggtttgagacacactttttgtagaatctacaagtggatatttggacctctctgaggatttcgttggaaacgggataactgcacctaactaaacggaagcattctcagaaactgctttgtgatgattgcattcacctcacagagttgaacattcctattgatagagcagtttggaaacactcttgttgtggaatgtgcaagtggagatttggagcgctttgaggcctatggtagtaaagggaatagcttcatagaaaaactagacagatgaattctcaggaactttttggtgatgtttgtattcaactcccagagttgaactttcctttggaaagagcagctatgaaacactctttttctagaatctgcaagtggacgtttggagggctttgtggtttgtggtggaaaaggaaatatcttcacctaaatactagagagaagcattctcagaagcttctctgtgatgactgcattcaactcacggagttgaacactccttttgagagcgcagttttgaaactctctttctgtggcatctgcaaggggacatgtagacctctttgaagatttcgttggaaaccgaatcatcttcacataaaaactatacagaagcagtctcagaatcttctttgtgatgtttgcattcaaatcccagagttgaactttcctttcaaagttcacgtttgaaacactctttttgcaggatctacaagtggatatttggaccactctgtgtccttcgtacgaaacgggtatatcttcacacgacatctagacagaagctttctcagaaaattctttgggatgattgagtggaactcacagagctgaacattccttgcgatgtagcagtttagaaacacactttctgcagaatctgcaagtgcatatttggacctctctgaggaattcgttggaaacgggataatttcagctgactaaacagaagcattctcagaaccttcttcgtgatgtctgcattcaactcacagtgtggaacctttctttgatagttcaggtttgaaacactctttttgtagaaactgcaaggggataattgcacttctttgaggcctaccgtagtaaaggaaataacttcctatagaaagaagacagaagcattctcagaaccctcttcgtgatgtttgcattcaactcacagtgctgaacctttctttgatagttcagctttgaaacactcttcttgtagaaactgcaagtggatatttggtcctctctgaggatttcgttggaaacgggataaaccgcacagaactaaacagaagcattctcagagccctcttcgtgatgtttgcattcaactcacagtgctgaacctttctttgatagtgcagctttgaaacactctttttgtagaaactgcaagtggatgtttggtcctctctgaggatttcgttggaaacgggataaaccgcacagaactaaaacagaagcattgtcagaacttctttgtgatgattgcattcaactcacagagttgaaggttccttttcaaacagcagtttccaatcactctttctgtggaatctgcaagtggatatttgggcctctctgaggatttcgttggaaacgggataaaacgcacagaactaaaacagaagcattctcagaaacttctctgtgatgtttgtgttcaactcccagagtttcacattgcttttcatagagtagttctgaaacatgttttttgtagtgtctgcaagtggacatttggagcgctttcaggcctgtggtggaaaacgaattatggtcacataaaaactggagagaagccttctcagaaacttctctgtgatgattgcattcaactcacagagttgaaccctcctatggatagagcagtgttgaaactctctttttgtggaatctgcaagtggatatgtggacctctccgaagatgtctttggaaacgggaatatcttcacataaaaactaaacagaagcattctcagaaacttcttggtgacgtttgcattcaaatcccagagttgaaccttcctttgagagttcaggtttgaaacactctttttgtaggatctgcaagtggatatttggaccactctgtggccttcgttcgaaacgggtacatcttcgcataaaatctagacagaagcattctcagaaaatactttgtgatgattgagttgaactcacagagctgaacattcctttggatggagcaggtttgagacacactttttgtagaatctacaagtggatatttggacctctctgaggatttcgttggaaacgggataactgcacctaactaaacggaagcattctcagaaactgctttgtgatgattgcattcacctcacagagttgaacattcctattgatagaggcagtttggaaacactcttgttgtggaatgtgcaagtggagatttggagcgctttgaggcctatggtagtaaagggaatagcttcatagaaaaactagacagatgcattctcaggaactttttggtgatgtttgtattcaactcccagagttgaactttcctttggaaagagcagctatgaaacactctttttctagaatctgcaagtggacgtttggagggctttgtggttttgtggtggaaaaggaaatatcttcacctaaatactagatagaagcattctcagaagcttctctgtgatgactgcattcaactcacggagttgaacactccttttgagagcgcagttttgaaactctctttctgtggcatctgcaaggggacatgtagacctctttgaagatttcgttggaaacggaatcatcttcacataaaaactatacagaagcagtctcagaatcttctttgtgatgtttgcattcaaatcccagagttgaactttcctttcaaagttcacgtttgaaacactctttttgcaggatctacaagtggatatttggaccactctgtgtccttcgttcgaaacgggtatatcttcacacgacatctagacagaagctttctcagaaaattctttgggatgattgagtggaactcacagagctgaacattccttgcgatgtagcagtttagaaacacactttctgcagaatctgcaagtgcatatttggacctctctgaggaattcgttggaaacgggataatttcagctgactaaacagaagcattctcagaaccttcttcgtgatgtctgcattcaactcacagtgtggaacctttctttgatagttcaggtttgaaacactctttttgtagaaactgcaaggggataattgcacttctttgaggcctaccgtagtaaaggaaataacttcctgtagaaagaagacagaagcattctcagaaccctcttcgtgatgtttgcattcaactcacagtgctgaacctttctttgatagttcagctttgaaacactcttcttgtagaaactgcaagtggatatttggtcctctctgaggatttcgttggaaacgggataaaccgcacagaactaaacagaagaattctcagagccctcttcgtgatgtttgcattcaactcacagtgctgaacctttctttgatagtgcagctttgaaacactctttttgtagaaactgcaagtggatgtttggtcctctctgaggatttcgttggaaacgggataaaccgcacagaactaaaacagaagcattgtcagaaacttctttgtgatgattgcattcaactcacagagttgaaggttccttttcaaacagcagtttccaatcactctttctgtggaatctgcaagtggatatttgggcctctctgaggatttcgttggaaacgggataaaacgcacagaactaaaacagaagcattctcagaaacttctctgtgatgtttgtgttcaactcccagagtttcacgttgcttttcatagagtagttctgaaacatgcttttcgtagtgtctgcaagtggacatttggagcgctttcaggcctgtggtggaaaacgaattatggtcacataaaaactggagagaagccttctcagaaacttctctgtgatgattgcattcaactcacagagttgaaccctcctatggatagagcagtgttgaaactctctttttgtggaatctgcaagtggatatgtggacctctccgaagatgtctttggaaacgggaatatcttcacataaaaactaaacagaagcattctcagaaacttcttggtgatgtttgcattcaaatcccagagttgaaccttcctttgatagttcaggtttgaaacactctttctgtaggatctgcaagtggctatttggaccactctgtggccttcgttcgaaacgggtatatcttcgcataaaatctagacagaagcattctcagaaaatactttgtgatgattgagtttaaatcacagagctgaccattcctttggatggagcaggtttgagacacactttttgtagaatctacaagtggatatttggacctctctgaggatttcgttggaaacgggataactgcacctaactaaacggaagcattctcagaaactgctttgtgatgattgcattcacctcacagagttgaacattcctattgatagagcagtttggaaacactcttgttgtggaatgtgcaagtggagatttggagcgctttgaggcctgtggtagtaaagggaatagcttcatagaaaaactagacagatgcattctcaggaaccttttggtgatgtttgtattcaactcccagagttgaactttcctttggaaagagcagctatgaaacactctttttctagaatctgcaagtggacgtttggagggctttgtggtttgtggtggaaaaggaaatatcttcacctaaatactagatagaagcattctcagaagcttctctgtgatgactgcattcaactcacggagttgaacactccttttgagagcgcagttttgaaactctctttctgtggcatctgcaaggggacatgtagacctctttgaagatttcgttggaaacggaatcatcttcacataaaaactatacagaagcagtctcagaatcttctttgtgatgtttgcattcaaatcccagagttgaactttcctttcaaagttcacgtttgaaacactctttttgcaggatctacaagtggatatttggaccactctgtgtccttcgttcgaaacgggtatatcttcacacgacatctagacagaagctttctcagaaaattctttgggatgattgagtggaactcacagagctgaacattccttgcgatgtagcagtttagaaacacactttctgcagaatctgcaagtgcatatttggacctctctgaggaattcgttggaaacgggataatttcagctgactaaacagaagcattctcagaaccttcttcgtgatgtctgcattcaactcacagtgtggaacctttctttgatagttcaggtttgaaacactctttttgtagaaactgcaaggggataattgcacttctttgaggcctaccgtagtaaaggaaataacttcctatagaaagaagacagaagcattctcagaaccctcttcgtgatgtttgcattcaactcacagtgctgaacctttctttgatagttcagctttgaaacactcttcttgtagaaactgcaagtggatatttggtcctctctgaggatttcgttggaaacgggataaaccgcacagaactaaacagaagaattctcagagccctcttcgtgatgtttgcattcaactcacagtgctgaacctttctttgatagtgcagctttgaaacactctttttgtagaaactgcaagtggatgtttggtcctctctgaggatttcgttggaaacgggataaaccgcacagaactaaaacagaagcattgtcagaaacttctttgtgatgattgcattcaactcacagagttgaaggttccttttcaaacagcagtttccaatcactctttctgtggaatctgcaagtggatatttgggcctctctgaggatttcgttggaaacgggataaaacgcacagaactaaaacagaagcattctcagaaacttctctgtgatgtttgtgttcaactcccagagtttcacgttgcttttcatagagtagttctgaaacatgcttttcgtagtgtctgcaagtggacatttggagcgctttcaggcctgtggtggaaaacgaattatggtcacataaaaactggagagaagccttctcagaaacttctctgtgatgattgcattcaactcacagagttgaaccctcctatggatagagcagtgttgaaactctctttttgtggaatctgcaagtggatatgtggacctctccgaagatgtctttggaaacgggaatatcttcacataaaaactaaacagaagcattctcagaaacttcttggtgatgtttgcattcaaatcccagagttgaaccttcctttgatagttcaggtttgaaacactctttctgtaggatctgcaagtggctatttggaccactctgtggccttcgttcgaaacgggtatatcttcgcataaaatctagacagaagcattctcagaaaatactttgtgatgattgagtttaaatcacagagctgaccattcctttggatggagcaggtttgagacacactttttgtagaatctacaagtggatatttggacctctctgaggatttcgttggaaacgggataactgcacctaactaaacggaagcattctcagaaactgctttgtgatgattgcattcacctcacagagttgaacattcctattgatagagcagtttggaaacactcttgttgtggaatgtgcaagtggagatttggagcgctttgaggcctatggtagtaaagggaatagcttcatagaaaaactagacagatgcattctcaggaactttttggtgatgtttgtattcaactcccagagttgaactttcctttggaaagagcagctatgaaacactctttttctagaatctgcaagtggacgtttggagggctttgtggtttgtggtggaaaaggaaatatcttcacctaaatactagatagaagcattctcagaagcttctctgtgatgactgcattcaactcacggagttgaacactccttttgagagcgcagttttgaaactctctttctgtggcatctgcaaggggacatgtagacctctttgaagatttcgttggaaacggaatcatcttcacataaaaactatacagaagcagtctcagaatcttctttttgatgtttgcattcaaatcccagagttgaactttcctttcaaagttcacgtttgaaacactctttttgcaggatctacaagtggatatttggaccactctgtgtccttcgttcgaaacgggtatatcttcacacgacatctagacagaagctttctcagaaaattctttgggatgattgagtggaactcacagagctgaacattccttgcgatgtagcagtttagaaacacactttctgcagaatctgcaagtgcatatttggacctctctgaggaattcgttggaaacgggataatttcagctgactaaacagaagcattctcagaaccttcttcgtgatgtctgcattcaactcacagtgtggaacctttctttgatagttcaggtttgaaacactctttttgtagaaactgcaaggggataattgcacttctttgaggcctaccgtagtaaaggaaataacttcctatagaaagaagacagaagcattctcagaaccctcttcgtgatgtttgcattcaactcacagtgctgaacctttctttgatagttcagctttgaaacactcttcttgtagaaactgcaagtggatatttggtcctctctgaggatttcgttggaaacgggataaaccgcacagaactaaacagaagcattctcagagccctcttcgtgatgtttgcattcaactcacagtgctgaacctttctttgatagtgcagctttgaaacactctttttgtagaaactgcaagtggatgtttggtcctctctgaggatttcgttggaaacgggataaaccgcacagaactaaaacagaagcattgtcagaaacttctttgtgatgattgcattcaactcacagagttgaaggttccttttcaaacagcagtttccaatcactctttctgtggaatctgcaagtggatatttgggcctctctgaggatttcgttggaaacgggataaaacgcacagaactaaaacagaagcattctcagaaacttctctgtgatgtttgtgttcaactcccagagtttcacgttgcttttcatagagtagttctgaaacatgcttttcgtagtgtctgcaagtggacatttggagcgctttcaggcctgtggtggaaaacgaattatggtcacataaaaactggagagaagccttctcagaaacttctctgtgatgattgcattcaactcacagagttgaaccctcctatggatagagcagtgttgaaactctctttttgtggaatctgcaagtggatatgtggacctctccgaagatgtctttggaaacgggaatatcttcacataaaaactaaacagaagcattctcagaaacttcttggtgatgtttgcattcaaatcccagagttgaaccttcctttgatagttcaggtttgaaacactctttctgtaggatctgcaagtggctatttggaccactctgtggccttcgttcgaaacgggtatatcttcgcataaaatctagacagaagcattctcagaaaatactttgtgatgattgagtttaaatcacagagctgaccattcctttggatggagcaggtttgagacacactttttgtagaatctacaagtggatatttggacctctctgaggatttcgttggaaacgggataactgcacctaactaaacggaagcattctcagaaactgctttgtgatgattgcattcacctcacagagttgaacattcctattgatagagcagtttggaaacactcttgttgtggaatgtgcaagtggagatttggagcgctttgaggcctatggtagtaaagggaatagcttcatagaaaaactagacagatgcattctcaggaactttttggtgatgtttgtattcaactcccagagttgaactttcctttggaaagagcagctatgaaacactctttttctagaatctgcaagtggacgtttggagggctttgtggtttgtggtggaaaaggaaatatcttcacctaaatactagatagaagcattctcagaagcttctctgtgatgactgcattcaactcacggagttgaacactccttttgagagcgcagttttgaaactctctttctgtggcatctgcaaggggacatgtagacctctttgaagatttcgttggaaacggaatcatcttcacataaaaactatacagaagcagtctcagaatcttctttgtgatgttagcattcaaatcccagagttgaactttcctttcaaagttcacgtttgaaacactctttttgcaggatctacaagtggatatttggaccactctgtgtccttcgtttgaaacgggtatatcttcacacgacatctagacagaaactttctcagaaaatcctttgggatgattgagttgaactcacagagctgaacattccttgcgatggagcagtttagaaacacactttctgcagaatctgcaagtgcatatttggacctctctgaggaattcgttggaaacgggataatttcagctgactaaacagaagcattctcagaaccttcttcgtgatgtctgcattcaactcacagtgtggaacctttctttgatagttcaggtttgaaacactctttttgtagaaactgcaaggggataattgcacttctttgaggcctaccgtagtaaaggaaataacttcctataaaaagaagacagaagcattctcaggaccctcttcgtgatgtttgcattcaactcacagtgctgaacctttctttgatagttcagctttgaaacactctttttgtagaaactgcaagtggatatttggtcctctctgaggatttcgttggaaacgggataaaccgcacagaactaaacagaagcattcacagaaaactcttggtgacgactgagtttaactcacagagctgaacattcctttggatggaacagtttcgaaacacactatttgtagaatctgcaagtggatatgtgggcctctctgaggatttcgttcgaaacgggataaaccgcacagaactaaaacagaagcattcacagaaaactcttggtgacgactgagtttaactcacagagctgaacattcctttggatggagcagtttcgaaacacactatttgtagaatgtgcaagtggatatttgggcctctctgaggatttcgttggaaacgcgataaaccgcacagaaataaagagaagcattctcagaaactactttgtgatgattgcattcaagtcacagagttgaacattccctttgacagagcagtttggaaactctctttgtgtagaatctgcaagtggagatatggaccgctttgaggcctatggtagtaaaggaaatagcttcatataaaagctagacagtagcattctcagaaacttctttgtgatgcttgcattcaactcacagagttgaactttcctttcgagagagaagctttgaaacactctttttccagaatctgcaagtggacatttggagggctttgaggcctgtggtggaaaaggaattatcttcccgtaaaagctagatagaagcattgtcagaaacttctttgtgatgattgcattcaactcacagagttgaaggttccttttcaaagagcagtttccaatcactctttgtgtggaatctgcaagtggatatttggacctattttgaagatttcgttggaaacgggagaatcttcacaggaaagctaaacagaagcattctcagaaacttctctgtgatgtttgtgttcaactcccagagtttcacattgcttttcatagagtagttctgaaacatgcttttcgtagtgtctacaagtggacatttggagcgctttcaggcctgtggtggaaaacgaattatggtcacataaaaactggagagaagccttctcagaaacttctctgtgatgattgcattcaactcacagagttgaaccctcctatggatagagcagtgttgaaactctctttttgtggaatctgcaagtggatatgtggacctctccgaagatgtctttggaaacgggaatatcttcacataaaaactaaacagaagcattctcagaaacttcttggtgatgtttgcattcaaatcccagagttgaaccttcctttgatagttcaggtttgaaacactctttttgtaggatctgcaagtggatatttggaccactctgtggccttcgttcgaaacgggtatatcttcgcataaaatctagacagaagcattctcagaaaatactttgtgatgattgagtttaactcacagagctgaacattcctttggatggagcaggtttgagacacaccttttgtacaatctacaagtggatatttggacctctctgaggatttcgttggaaacgggataactgcacctaactaaacggaagcattctcagaaactgctttgtgatgattgcattcacctcacagagttgaacattcctattgatagagcagtttggaaacactcttgttgtggaatgtgcaagtggagatttggagcgctttgaggcctatggtagtaaagggaatagcttcatagaaaaactagacagatgcattctcaggaactttttggtgatgtttgtattcaactcccagagttgaactttcctttggaaagagcagctatgaaacactgtttttctagaatctgcaagtggacgtttggagggctttgtggtttgtggtggaaaaggaaatatcttcacctaaatactagatagaagcattctcagaagcttctctgtgatgactgcattcaactcacggagttgaacactccttttgagagcgcagttttgaaactctctttctgtggcatctgcaaggggacatgtagacctctttgaagatttcgttggaaacggaatcatcttcacataaaaactatacagaagcagtctcagaatcttctttgtgatgtttgcattcaaatccccgagttgaactttcctttcaaagttcacgtttgaaacactctttttgcaggatctacaagtggatatttggaccactctgtgtccttcgttcgaaacgggtatatcttcacatgacatctagacagaagctttctcagaaaattctttgggatgattgagtggaactcacagagctgaacattccttgcgatgtagcagtttagaaacacactttctgcagaatctgcaagtgcatatttggacctctccgaggaattcgttggaaacgggataatttcagctgactaaacagaagcattctcagaaccttcttcgtgatgtctgcattcaactcacagtgtggaacctttctttgatagttcaggtttgaaacactctttttgtagaaactgcaaggggataattgcacttctttgaggcctaccgtagtaaaggaaataacttcctatagaaagaagacagaagcattctcagaaccctcttcgtgatgtttgcattcaactcacagtgctgaacctttctttgatagttcagctttgaaacactcttcttgtagaaactgcaagtggatatttggtcctctctgaggatttcgttggaaacgggataaaccgcacagaactaaacagaagaattctcagagccctcttcgtgatgtttgcattcaactcacagtgctgaacctttctttgatagtgcagctttgaaacactctttttgtagaaactgcaagtggatgtttggtcctctctgaggatttcgttggaaacgggataaaccgcacagaactaaaacagaagcattgtcagaaacttctttgtgatgattgcattcaactcacagagttgaaggttccttttcaaacagcagtttccaatcactctttctgtggaatctgcaagtggatatttgggcctctctgaggatttcgttggaaacgggataaaacgcacagaactaaaacagaagcattctcagaaacttctctgtgatgtttgtgttcaactcccagagtttcacgttgcttttcatagagtagttctgaaacatgcttttcgtagtgtctgcaagtggacatttggagcgctttcaggcctgtggtggaaaacgaattatggtcacataaaaactggagagaagccttctcagaaacttctctgtgatgattgcattcaactcacagagttgaaccctcctatggatagagcagtgttgaaactctctttttgtggaacctgcaagtggatatgtggacctctccgaagatgtctttggaaacgggaatatcttcacataaaaactaaacagaagcattctcagaaacttcttggtgatgtttgcattcaaatcccagcagttgaaccttcctttgatagttcaggtttgaaacactctttctgtaggatctgcaagtggctatttggaccactctgtggccttcgttcgaaacgggtatatcttcgcataaaatctagacagaagcattctcagaaaatactttgtgatgattgagtttaaatcacagagctgaccattcctttggatggagcaggtttgagacacactttttgtagaatctacaagtggatatttggacctctctgaggatttcgttggaaacgggataactgcacctaactaaacggaagcagcattctcagaaactgctttgtgatgattgcattcacctcacagagttgaacattcctattgatagagcagtttggaaacactcttgttgtggaatgtgcaagtggagatttggagcgctttgaggcctatggtagtaaagggaatagcttcatagaaaaactagacagatgcattctcaggaactttttggtgatgtttgtattcaactcccagagttgaactttcctttggaaagagcagctatgaaacactctttttctagaatctgcaagtggacgtttggagggctttgtggtttgtggtggaaaaggaaatatcttcacctaaatactagatagaagcattctcagaagcttctctgtgatgactgcattcaactcacggagttgaacactccttttgagagcgcagttttgaaactctctttctgtggcatctgcaaggggacatgtagacctctttgaagatttcgttggaaacggaatcatcttcacataaaaactatacagaagcagtctcagaatcttctttgtgatgtttgcattcaaatcccagagttgaactttcctttcaaagttcacgtttgaaacactctttttgcaggatctacaagtggatatttggaccactctgtgtccttcgttcgaaacgggtatatcttcacacgacatctagacagaagctttctcagaaaattctttgggatgattgagtggaactcacagagctgaacattcccttgcgatgtagcagtttagaaacacactttctgcagaatctgcaagtgcatatttggacctctctgaggaattcgttggaaacgggataatttcagctgactaaacagaagcattctcagaaccttcttcgtgatgtctgcattcaactcacagtgtggaacctttctttgatagttcaggtttgaaacactctttttgtagaaactgcaaggggataattgcacttctttgaggcctaccgtagtaaaggaaataacttcctatagaaagaagacagaagcattctcagaaccctcttcgtgatgtttgcattcaactcacagtgctgaacctttctttgatagttcagctttgaaacactcttcttgtagaaactgcaagtggatatttggtcctctctgaggatttcgttggaaacgggataaaccgcacagaactaaacagaagaattctcagagccctcttcgtgatgtttgcattcaactcacagtgctgaacctttctttgatagtgcagctttgaaacactctttttgtagaaactgcaagtggatgtttggtcctctctgaggatttcgttggaaacgggataaaccgcacagaactaaaacagaagcattgtcagaaacttctttgtgatgattgcattcaactcacagagttgaaggttccttttcaaacagcagtttccaatcactctttctgtggaatctgcaagtggatatttgggcctctctgaggatttcgttggaaacgggataaaacgcacagaactaaaacagaagcattctcagaaacttctctgtgatgtttgtgttcaactcccagagtttcacgttgcttttcatagagtagttctgaaacatgcttttcgtagtgtctgcaagtggacatttggagcgctttcaggcctgtggtggaaaacgaattatggtcacataaaaactggagagaagccttctcagaaacttctctgtgatgattgcattcaactcacagagttgaaccctcctatggatagagcagtgttgaaactctctttttgtggaatctgcaagtggatatgtggacctctccgaagatgtctttggaaacgggaatatcttcacataaaaactaaacagaagcattctcagaaacttcttggtgatgtttgcattcaaatcccagagttgaaccttcctttgatagttcaggtttgaaacactctttctgtaggatctgcaagtggctatttggaccactctgtggccttcgttcgaaacgggtatatcttcgcataaaatctagacagaagcattctcagaaaatactttgtgatgattgagtttaaatcacagagctgaccattcctttggatggagcaggtttgagacacactttttgtagaatctacaagtggatatttggacctctctgaggatttcgttggaaacgggataactgcacctaactaaacggaagcattctcagaaactgctttgtgatgattgcattcacctcacagagttgaacattcctattgatagagcagtttggaaacactcttgttgtggaatgtgcaagtggagatttggagcgctttgaggcctatggtagtaaagggaatagcttcatagaaaaactagacagatgcattctcaggaactttttggtgatgtttgtattcaactcccagagttgaactttcctttggaaagagcagctatgaaacactctttttctagaatctgcaagtggacgtttggagggctttgtggtttgtggtggaaaaggaaatatcttcacctaaatactagatagaagcattctcagaagcttctctgtgatgactgcattcaactcacggagttgaacactccttttgagagcgcagttttgaaactctctttctgtggcatctgcaaggggacatgtagacctctttgaagatttcgttggaaacggaatcatcttcacataaaaactatacagaagcagtctcagaatcttctttgtgatgtttgcattcaaatcccagagttgaactttcctttcaaagttcacgtttgaaacactctttttgcaggatctacaagtggatatttggaccactctgtgtccttcgttcgaaacgggtatatcttcacacgacatctagacagaagctttctcagaaaattctttgggatgattgagtggaactcacagagctgaacattccttgcgatggagcagtttagaaacacactttctgcagaatctgcaagtgcatatttggacctctctgaggaattcgttggaaacgggataatttcagctgactaaacagaagcattctcagaaccttcttcgtgatgtctgcattcaactcacagtgtggaacctttctttgatagttcaggtttgaaacactctttttgtagaaactgcaaggggataattgcacttctttgaggcctaccgtagtaaaggaaataacttcctatagaaagaagacagaagcattctcagaaccctcttcgtgatgtttgcattcaactcacagtgctgaacctttctttgatagttcagctttgaaacactcttcttgtagaaactgcaagtggatatttggtcctctctgaggatttcgttggaaacgggataaaccgcacagaactaaacagaagaattctcagagccctcttcgtgatgtttgcattcaactcacagtgctgaacctttctttgatagtgcagctttgaaacactctttttgtagaaactgcaagtggatgtttggtcctctctgaggatttcgttggaaacgggataaaccgcacagaactaaaacagaagcattgtcagaaacttctttgtgatgattgcattcaactcacagagttgaaggttccttttcaaacagcagtttccaatcactctttctgtggaatctgcaagtggatatttgggcctctctgaggatttcgttggaaacgggataaaacgcacagaactaaaacagaagcattctcagaaacttctctgtgatgtttgtgttcaactcccagagtttcacgttgcttttcatagagtagttctgaaacatgcttttcgtagtgtctgcaagtggacatttggagcgctttcaggcctgtggtggaaaacgaattatggtcacataaaaactggagagaaagccttctcagaaacttctctgtgatgattgcattcaactcacagagttgaaccctcctatggatagagcagtgttgaaactctctttttgtggaatctgcaagtggatatgtggacctctccgaagatgtctttggaaacgggaatatcttcacataaaaactaaacagagcattctcagaaacttcttggtgatgtttgcattcaaatcccagagttgaaccttcctttgatagttcaggtttgaaacactctttttgtaggatctgcaagtggatatttggaccactctgtggcctttgttcgaaacgggtacatcttcgcataaaatctagacagaagcattctcagaaaatactttgtgatgattgagtttaactcacagagctgaacattcctttggatggagcaggtttgagacacactttttgtagaatctacaagtggatatttggacctctctgaggatttcgttggaaacgcgataactgcacctaactaaacggaagcattctcagaaactgctttgtgatgattgcattcacctcacagagttgaacattcctattgatagagcagtttggaaacactcttgttgtggaatgtgcaagtggagatttggagcgctttgaggcctatggtagtaaagggaatagcttcatagaaaaactagacagatgcattctcaggaactttttggtgatgtttgtattcaactcccagagttgaactttcctttggaaagagcagctatgaaacactttttgtagaatctgcaagtggacgtttggagggctttgtggtttgtggtggaaaaggaaatatcttcacctaaatactagatagaagcattctcagaagcttctctgtgatgactgcattcaactcacggagttgaacactccttttgagagtgcagttttgaaactctctttctgtggcatctgcaaggggacatgtagacctctctgaagatttcgttggaaacggaatcatcttcacataaaaactatacagaagcagtctcagaatcttctttgtgatgtttgcattcaaatcccagagttgaatttcctttcaaagttcacgtttgaaacactctttttgcaggatctacaagtggatatttggaccactctgtgtccttcgttcgaaacgggtatatcttcacatgacatctagacagaagctttctcagaaaattctttgggatgattgagtggaactcacagagctgaacattccttgcgatggagcagtttagaaacacactttctgcagaatctgcaagtgcatatttggacctctctgaggaattcgttggaaacgggataatttcagctgactaaacagaagcattctcagaaccctcttcgtgatgtttgcattcaactcacagtgctgaacctttctttgatagttcaggtttgaaacactctttttgtagaaactgcaaggggataattgcacttctttgaggcctaccgtagtaaaggaaataacttcctatagaaagaagacagaagaattctcagagccctcttcgtgatgtttgcattcaactcacagtgctgaacctttctttgatagtgcagctttgaaacactctttttgtagaaactgcaagtggatgtttggtcctctctgaggatttcgttggaaacgggataaaccgcacagaactaaaacagaagcattgtcagaaacttctttgtgatgattgcattcaactcacagagttgaaggttccttttcaaacagcagtttccaatcactctttctgtggaatctgcaagtggatatttgggcctctctgaggatttcgttggaaacgggataaaacgcacagaactaaaacagaagcattctcagaaacttctctgtgatgtttgtgttcaactcccagagtttcacgttgcttttcatagagtagttctgaaacatgcttttcgtagtgtctgcaagtggacatttggagcgctttcaggcctgtggtggaaaacgaattatggtcacataaaaactggagagaagccttctcagaaacttctctgtgatgattgcattcaactcacagagttgaaccctcctatggatagagcagtgttgaaactctctttttgtggaatctgcaagtggatatgtggacctctccgaagatgtctttggaaacgggaatatcttcacataaaaactaaacagaagcattctcagaaacttcttggtgatgtttgcattcaaatcccagagttgaaccttcctttgatagttcaggtttgaaacactctttctgtaggatctgcaagtggctatttggaccactctgtggccttcgttcgaaacgggtatatcttcgcataaaatctagacagaagcattctcagaaaatactttgtgatgattgagtttaaatcacagagctgaccattcctttggatggagcaggtttgagacacactttttgtagaatctacaagtggatatttggacctctctgaggatttcgttggaaacgggataactgcacctaactaaacggaagcattctcagaaactgctttgtgatgattgcattcacctcacagagttgaacattcctattgatagagcagtttggaaacactcttgttgtggaatgtgcaagtggagatttggagcgctttgaggcctatggtagtaaagggaatagcttcatagaaaaactagacagatgcattctcaggaactttttggtgatgtttgtattcaactcccagagttgaactttcctttggaaagagcagctatgaaacactctttttctagaatctgcaagtggacgtttggagggctttgtggtttgtggtggaaaaggaaatatcttcacctaaatactagatagaagcattctcagaagcttctctgtgatgactgcattcaactcacggagttgaacactccttttgagagcgcagttttgaaactctctttctgtggcatctgcaaggggacatgtagacctctttgaagatttcgttggaaacggaatcatcttcacataaaaactatacagaagcagtctcagaatcttctttgtgatgtttgcattcaaatcccagagttgaactttcctttcaaagttcacgtttgaaacactctttttgcaggatctacaagtggatatttggaccactctgtgtccttcgttcgaaacgggtatatcttcacacgacatctagacagaagctttctcagaaaattctttgggatgattgagtggaactcacagagctgaacattccttgcgatgtagcagtttagaaacacactttctgcagaatctgcaagtgcatatttggacctctctgaggaattcgttggaaacgggataatttcagctgactaaacagaagcattctcagaaccttcttcgtgatgtctgcattcaactcacagtgtggaacctttctttgatagttcaggtttgaaacactctttttgtagaaactgcaaggggataattgcacttctttgaggcctaccgtagtaaaggaaataacttcctatagaaagaagacagaagcattctcagaaccctcttcgtgatgtttgcattcaactcacagtgctgaacctttctttgatagttcagctttgaaacactcttcttttagaaactgcaagtggatatttggtcctctctgaggatttcgttggaaacgggataaaccgcacagaactaaacagaagaattctcagagccctcttcgtgatgtttgcattcaactcacagtgctgaacctttctttgatagtgcagctttgaaacactctttttgtagaaactgcaagtggatatttggtcctctctgaggatttcgttggaaacgggataaaccgcacagaactaaaacagaagcattcacagaaaactcttggtgacgactgagtttaactcacagagctgaacattcctttggatggagcagtttcgaaacacactatttgtagaatctgcaagtggatatttgggcctctctgaggatttcgttggaaacgggataaaacgcatagaactaaaacagaagcattctcagaaactactttgtgatgattgcattcaagtcacagagttgaacattccctttgacagaacagtttggaaactctctttgtgtagaatctgcaagtggagatatggaccgctttgaggcctatggtagtaaaggaaatagcttcatataaaagctagacagtagcattctaagaaacgtctttgtgatgcttgcattcaactcacagagttgaactttcctttcgagagagaagctttgaaacactctttttccagaatgtgcaagtggacatttggggagctttgaggcctgtggtggaaaaggaattatcttcccgtaaaagctagatagaagcattgtcagaaacttctttgagatgattgcattcaactcacagagttgaaggttccttttcaaacagcagtttccaatcactctttctgtggaatctgcaagtggatatttcgacctctttgaagatttcgttggaaacgggagaatcttcacagaaaagctaaacagaagcattctcagaaacttctctgtgatgtttgtgttcaactcccagagtttcacattgcttttcatagagtagttctgaaacatgcttttcgtagtgtctacaagtggacatttggagcgctttcaggcctgtggtggaaaacgaattatggtcacataaaaactggagagaagccttctcagaaacttctctgtgatgattgcattcaactcacagagttgaaccctcctatggatagagcagtgttgaaactctctttttgtggaatctgcaagtggatatgtggacctctccgaagatgtctttggaaacgggaatatcttcacataaaaactaaacagaagcattctcaggaacttcttggtgatgtttgcattcaaatcccagagtcgaaccttcctttgatagttcaggtttgaaacactctttttgtaggatctgcaagtggatatttggaccactctgtggccttcgttcgaaacgggtatatcttcgcataaaatctagacagaagcattctcagaaaatactttgtgatgattgagtttaactcacagagctgaacattcctttggatggagcaggtttgagacacactttttgtagaatctacaagtggatatttggacctctctgaggatttcgttggaaacgggataactgcacctatctaaacggaagcattctcagaaactgctttgtgatgattgcattcacctcacagagttgaacattcctattgatagagcagtttggaaacactcttgttgtggaatgtgcaagtggagatttggagcgctttgaggcctatggtagtaaagggaatagcttcatagaaaaactagacagatgcattctcaggaactttttggtgatgtttgtattcaactcccagagttgaactttcctttggaaagagcagctatgaaacactctttttctagaatctgcaagtggacgtttggagggctttgtggtttgtggtggaaaaggaaatatcttcacctaaatactagatagaagcattctcagaagcttctctgtgatgactgcattcaactcacggagttgaacactccttttgagagcgcagttttgaaactctctttctgtggcatctgcaaggggacatgtagacctctttgaagatttcgttggaaacggaatcatcttcacataaaaactatacagaagcagtctcagaatcttctttgtgatgtttgcattcaaatcccagagttgaactttcctttcaaagttcacgtttgaaacactctttttgcaggatctacaagtggatatttggaccactctgtgtccttcgttcgaaacgggtatatcttcacacgacatctagacagaagctttctcagaaaattctttgggatgattgagtggaactcacagagctgaacattccttgcgatggagcagtttagaaacacactttctgcagaatctgcaagtgcatatttggacctctctgaggaattcgttggaaacgggataatttcagctgactaaacagaagcattctcagaaccttcttcgtgatgtctgcattcaactcacagtgtggaacctttctttgatagttcaggtttgaaacactctttttgtagaaactgcaaggggataattgcacttctttgaggcctaccgtagtaaaggaaataacttcctatagaaagaagacagaagcattctcagaaccctcttcgtgatgtttgcattcaactcacagtgctgaacctttctttgatagttcagctttgaaacactcttcttgtagaaactgcaagtggatatttggtcctctctgaggatttcgttggaaacgggataaaccgcacagaactaaacagaagaattctcagagccctcttcgtgatgtttgcattcaactcacagtgctgaacctttctttgatagtgcagctttgaaacactctttttgtagaaactgcaagtggatatttggtcctctctgaggatttcgttggaaacgggataaaccgcacagaaataaaacagaagcattctcagaaccttcttcgtgatgtttgcattcaactcacagtgttgaacctttctttgatagttcaggttggaaacggtctttctgtagaaactgcaagtagatatttggacctctctgaggatttcgttggaaacgggataaaccgcacagaactaaaacagaagcattcacagaaaactcttggtgacgactgagtttaactcacagagctgaacattcctttggatggagcagtttcaaaacacactatttgtagaatgtgcaagtggatatttgggcctctctgaggatttcattggaaacgggataaaccgcacagaactaaacagaagcattctcagaaactactttgtgatgatagcattcaagtcacagagttgaacattccctttgacacagcagtttggaaactctctttgtgtagaatctgcaagtggagatatggaccgctttgaggcctatggtagtaaaggaaatagcttcatataaaagctagacagtagcattctcagaaacttctttgtgatgcttgcattcaactcacagagttgaactttcctttcgagagagaagctttgaaacactctttttccagaatctgcaagtggacatttggagggctttgaggcctgtggtggaaaaggaattatcttcccgtaaaagctagatggaagcattgtcagaaacttctttgtgatgattgcattcaactcacagagttgaaggttccttttcaaacagcagtttccaatcactctttctgtggaatctgcaagtggatatttggacctattttgaagatttcgttggaaacgggataatcttcacagaaaagctaaacagaagcattctcagaaacttctctgtgatgtttgtgttcaactcccagagtttcacgttgcttttcatagagtagttctgaaacatgcttttcgtagtgtctgcaagtggacatttggagcgctttcaggcctgtggtggaaaacgaattatggtcacataaaaactggagagaagccttctcagaaacttctctgtgatgattgcattcaactcacagagttgaaccctcctatggatagagcagtgttgaaactctctttttgtggaatctgcaagtggatatgtggacctctccgaagatgtctttggaaacgggaatatcttcacataaaaactaaacagaagcattctcagaaacttcttggtgatgtttgcattcaaatcccagagttgaaccttcctttgatagttcaggtttgaaacactctttctgtaggatctgcaagtggctatttggaccactctgtggccttcgttcgaaacgggtatatcttcgcataaaatctagacagaagcattctcagaaaatactttgtgatgattgagtttaaatcacagagctgaccattcctttggatggagcaggtttgagacacactttttgtagaatctacaagtggatatttggacctctctgaggatttcgttggaaacgggataactgcacctaactaaacggaagcattctcagaaactgctttgtgatgattgcattcacctcacagagttgaacattcctattgatagagcagtttggaaacactcttgttgtggaatgtgcaagtggagatttggagcgctttgaggcctgtggtagtaaagggaatagcttcatagaaaaactagacagatgcattctcaggaactttttggtgatgtttgtattcaactcccagagttgaactttcctttggaaagagcagctatgaaacactctttttctagaatctgcaagtggacgtttggagggctttgtggtttgtggtggaaaaggaaatatcttcacctaaatactagatagaagcattctcagaagcttctctgtgatgactgcattcaactcacggagttgaacactccttttgagagcgcagttttgaaactctctttctgtggcatctgcaaggggacatgtagacctctttgaagatttcgttggaaacggaatcatcttcacataaaaactatacagaagcagtctcagaatcttctttgtgatgtttgcattcaaatcccagagttgaacttgcctttcaaagttcacgtttgaaacactctttttgcaggatctacaagtggatatttggaccactctgtgtccttcgttcgaaacgggtatatcttcacatgacatctagacagaagctttctcagaaaatcctttgggatgattgagtggaactcacagagctgaacattccttgcgatgtagcagtttagaaacacactttctgcagaatctgcaagtgcatatgtggacctctctgaggaattcgttggaaacgggataatttcagctgactaaacagaagcattctcagaaccttcttcgtgatgtctgcattcaactcacagtgtggaacctttctttgatagttcaggtttgaaacactctttttgtagaaactgcaaggggataattgcacttctttgaggcctaccgtagtaaaggaaataacttcctatagaaagaagacagaaacattctcagaaccctcttcgtgatgtttgcattcaactcacagtgctgaacctttctttgatagttcagctctgaaacactcttcttgtagaaactgcaagtggatatttggtcctctctgaggatttcgttggaaacgggataaaccgcacagaactaaacagaagaattctcagagccctcttcgtgatgtttgcattcaactcacagtgctgaacctttctttgatagtgcagctttgaaacactctttttgtagaaactgcaagtggatgtttggtcctctctgaggatttcgttggaaacgggataaaccgcacagaactaaaacagaagcattgtcagaaacttctttgtgatgattgcattcaactcacagagttgaaggttccttttcaaacagcagtttccaatcactctttctgtggaatctgcaagtggatatttgggcctctctgaggatttcgttggaaacgggataaaacgcacagaactaaaacagaagcattctcagaaacttctctgtgatgtttgtgttcaactcccagagtttcacgttgcttttcatagagtagttctgaaacatgcttttcgtagtgtctgcaagtggacatttggagcgctttcaggcctgtggtggaaaacgaattatggtcacataaaaactggagagaagccttctcagaaacttctctgtgatgattgcattcaactcacagagttgaaccctcctatggatagagcagtgttgaaactctctttttgtggaatctgcaagtggatatgtggacctctccgaagatgtctttggaaacgggaatatcttcacataaaaactaaacagaagcattctcagaaacttcttggtgatgtttgcattcaaatcccagagttgaaccttcctttgatagttcaggtttgaaacactctttctgtaggatctgcaagtggctatttggaccactctgtggccttcgttcgaaacgggtatatcttcgcataaaatctagacagaagcattctcagaaaatactttgtgatgattgagtttaaatcacagagctgaccattcctttggatggagcaggtttgagacacactttttgtagaatctacaagtggatatttggacctctctgaggatttcgttggaaacgggataactgcacctaactaaacggaagcattctcagaaactgctttgtgatgattgcattcacctcacagagttgaacattcgtattgatagagcagtttggaaacactcttcttgtggaatgtgcaagtggagatttggagcgctttggggcctatggtagtaaagggaatagcttcatagaaaaactagacagatgcattctcaggaattttttggtgatgtttgtgttcaactcccagagttgaactttcctttggaaagagcagctatgaaacactctttttctagaatctgcaagtggacgtttggagggctttgtggtttgtggtggaaaaggaaatatcttcacctaaatactagatagaagcattctcagaagcttctctgtgatgactgcattcaactcacggagttgaacactccttttgagagcgcagttttgaaactctctttctgtggcatctgcaaggggacatgtagacctctttgaagatttcgttggaaacggaatcatcttcacataaaaactatacagaagcagtctcagaatcttctttgtgatgtttgcattcaaatcccagagttgaactttcctttcaaagttcacgtttgaaacactctttttgcaggatctacaagtggatatttggaccactctgtgtccttcgttcgaaacgggtatatcttcacacgacatctagacagaagctttctcagaaaattctttgggatgattgagtggaactcacagagctgaacattccttgcgatggagcagtttagaaacacactttctgcagaatctgcaagtgcatatttggacctctctgaggaattcgttggaaacgggataatttcagctgactaaacagaagcattctcagaaccttcttcgtgatgtctgcattcaactcacagtgtggaacctttctttgatagttcaggtttgaaacactctttttgtagaaactgcaaggggataattgcacttctttgaggcctaccgtagtaaaggaaataacttcctatagaaagaagacagaagcattctcagaaccctcttcgtgatgtttgcattcaactcacagtgctgaacctttctttgatagttcagctttgaaacactcttcttgtagaaactgcaagtggatatttggtcctctctgaggatttcgttggaaacgggataaaccgcacagaactaaacagaagaattctcagagccctcttcgtgatgtttgcattcaactcacagtgctgaacctttctttgatagtgcagctttgaaacactctttttgtagaaactgcaagtggatgtttggtcctctctgaggatttcgttggaaacgggataaaccgcacagaactaaaacagaagcattgtcagaaacttctttgtgatgattgcattcaactcacagagttgaaggttccttttcaaacagcagtttccaatcactctttctgtggaatctgcaagtggatatttgggcctctctgaggatttcgttggaaacgggataaaacgcacagaactaaaacagaagcattctcagaaacttctctgtgatgtttgtgttcaactcccagagtttcacgttgcttttcatagagtagttctgaaacatgcttttcgtagtgtctgcaagtggacatttggagcgctttcaggcctgtggtggaaaacgaattatggtcacataaaaactggagagaagccttctcagaaacttctctgtgatgattgcattcaactcacagagttgaaccgtcctatgcatagagcagtgttgaaactctctttttgtggaatctgcaagtggatatgtggacctctccgaagatgtctttggaaacgggaatatcttcacataaaaactaaacagacattctcagaaacttcttggtgatgtttgcattcaaatcccagagttgaaccttcctttgatagttcaggtttgaaacactctttctgtaggatctgcaagtggctatttggaccactctgtggccttcgttcgaaacgggtatatcttcgcataaaatctagacagaagcattctcagaaaatactttgtgatgattgagttgaactcacagagctgaacattcctttggatggagcaggtttgagacacactttttgtagaatctacaagtggatatttcgacctctctgaggatttcgttggaaacgggataactgcacctaactaaacggaagcattctcagaaactgctttgtgatgattgcattcacctcacagagttgaacattcctattgatagagcagtttggaaacactcttgttgtggaatgtgcaagtggagatttggagcgctttgaggcctatggtagtaaagggaatagcttcatagaaaaactagacagatgcattctcaggaactttttggtgatgtttgtattcaactcccagagttgaactttcctttggaaagagcagctatgaaacactctttttctagaatctgcaagtggacgtttggagggctttgtggtttgtggtggaaaaggaaatatcttcacctaaatactagatagaagcattctcagaagcttctctgtgatgactgcattcaactcacggagttgaacactccttttgagagcgcagttttgaaactctctttctgtggcatctgcaaggggacatgtagacctctttgaagatttcgttggaaacggaatcatcttcacataaaaactatacagaagcagtctcagaatcttctttgtgatgtttgcattcaaatcccagagttgaactttcctttcaaagttcacgtttgaaacactctttttgcagggtctacaagtggatatttggaccactctgtgtccttcgttcgaaacgggtatatcttcacatgacatctagacagaagctttctcagaaaattctttgggatgattgagtggaactcacagagctgaacattccttgcgatgtagcagtttagaaacacactttctgcagaatctgcaagtgcatatttggacctctctgaggaattcgttggaaacgggataatttcagctgactaaacagaagcattctcagaaccttcttcgtgatgtctgcattcaactcacagtgtggaacctttctttgatagttcaggtttgaaacactctttttgtagaaactgcaaggggataattgcacttctttgaggcctaccgtagtaaagggaataacttcctatagaaagaagacagaagaattctcagagccctcttcgtgatgtttgcattcaactcacagtgctgaacctttctttgatagtgcagctttgaaacactctttttgtagaaactgcaagtggatatttggtcctctctgaggatttcgttggaaacgggataaaccgcacagaactaaacagaagcattcacagaaaactcttgttgacgactgagtttaactcacagagctgaacattcctttggatggagcagtttcgaaacacactatttgtagaatctgcaagtggatatttgggcctctctgaggatttcgttggaaacgggataaaacgcacagaactaaaacagaagcattctcagaaactactttgtgatgattgcattcaagtcacagagttgaacattccctttgacagagcagtttggaaactctctttgtgtagaatctgcaagtggagatatggaccgctttgaggcctatggtagtaaaggaaatagcttcatataaaagctagacagtagcattctcagaaacttctttgtgatgcttgcattcaactcacagagttgaactttcctttcgagagagaagctttgaaacactctttttccagaatctgcaagtggacatttggagggctttgaggcctgtgttggaaaaggaattatcttcccgtaaaagctagacagaagcattgtcagaaacttctttgtgatgattgcattcaactcacagagttgaaggttccttttcaaagagcagtttccaatcactctttctgtggaatctgcaagtggatatttggacctctttgaagatttcgttggaaacgggagaatcttcacagaaaagctaaacagaagctttctcagaaacttctctgtgatgtttgtgttcaactcccagagtttcacattgcttttcatagagtagttctgaaacatgcttttcgtagtgtctgcaagtggacatttggagcgctttcaggcctgtggtggaaaacgaattatggtcacataaaaactggagagaagccttctcagaaacttctctgtgatgattgcattcaactcacagatttgaaccctcctatggatagagcagtgttgaaactctctttttgtggaatctgcaagtggatatgtggacctctccgaagatgtctttggaaacgggaatatcttcacataaaaactaaacagaagcattctcagaaacttcttggtgatgtttgcattcaaatcccagaagttgaaccttcctttgatagttcaggtttgaaacactctttttgtaggatctgcaagtggatatttggaccactctgtggccttcgttcgaaacggctatatcttcgcataaaatctagacagaaacattctcagaaaatactttgtgatgattgagtttaaatcacagagctgaacattcctttggatggagcaggtttgagacacactttttgtagaatctacaagtggatatttggacctctctgaggatttcgttggaaacgggataactgcacctaactgaacggaagcattctcagaaactgctttgtgatgattgcattcacctcacagagttgaacattcctattgatagagcagtttggaaacactcttgttgtggaatgtgcaaatggagatttggagcgctttgaggcctatggtagtaaagggaatagcttcatagaaaaactagacagatgcattctcaggaactttttggtgatgtttgtattcaactcccagagttgaactttcctttggaaagagcagctatgaaacactctttttctagaatctgcaagtggacgtttggagggctttgtggtttgtggtggaaaaggatatatcttcacctaaatactagagagaagcattctcagaagcttctctgtgatgactgcattcaactcacggagttggacactccttttgagagcgcagttttgaaactctctttctgtggcatccgcaaggggacatgtggacctctttgaagatttcgttggaaacggaatcatcttcacataaaaactatacagaagcagtctcagaatcttctttgtgatgtttgcattcaaatcccagagttgaactttcctttcaaagttcacgtttgaaacactctttttgcaggatctacaagtggatatttggaccactctgtgtccttcgttcgaaacgggtatatcttcacatgacatctagacagaagctttctcagaaaattctttgggatgattgagttgaactcacagagctgaacattccttgcgatggagcagtttagaaacacactttctgcagaatctgcaagtgcatatttggacctctctgaggaattcgttggaaacgggataatttcagctgactaaacagaagcattctcagaaccttcttcgtgatgtctgcattcaactcacagtgtggaacctttctttgatagttcaggtttgaaacactctttttgtagagactgcaaggggataattgcacttctttgaggcctaccgtagtaaaggaaataacttcctataaaaagaagacagaagcattctcagaaccctcttcgagatgtttgcattcaactcacagtgctgaaactttctttgatagttcagctttgaaacactctttttgtagaaactgcaagtggatacttggtcctctctgaggatttcgttggaaaagggataaaccgcacagaactaaacagaagcattcacagaaaactcttggtgacgactgagtttaactcacagagctgaacattcctttggatggagcagtttcgaaacacactatttgtagaatctgcaagtggatatttgggcctctctgaggatttcgttggaaacgggataaaacacacagaactaaaacagaagcattctcagaaactactttgtgatgattgcattcaagtcacagagttgaacattccctttgacagagcagtttggaaactctctttgtgtagaatctgcaagtggagatatggaccgctttgaggcctatggtagtaaaggaaatagcttcatataaaagctagacagtagcattctcagaaacttctttgtgatgcttgcattcaactcacagagttgaactttcctttcgagagagaagctttgaaacactctttttccagaatgtgcaagtggacatttggggagctttgaggcctgtggtggaaaaggaattatcttcccgtaaaagctagatagaagcattgtcagaaacttctttgtgatgattgcattcaactcacagagttgaagattccttttcaaacagcagtttccaatcactctttctgtggaatctgcaagtggatatttcgacctctttgaagatttctttggaaacgggagaatcttcacagaaaagctaaacagaagcattctcagaaacttctctgtgatgtttgtgttcaactcccagagtttcacgttgcttttcatagagtagttctgaaacatgcttttcttagtgtctgcaagtggacatttggagcgctttcaggcctgtggtggaaaacgaattatggtcacataaaaactggagagatgccttctcagaaacttctctgtgatgattgcattcaactcacagagttgaaccctcctatggatagagcagtgttgaaactctctttttgtggaatctgcaagtggatatgtggacctctccgaagatgtctttggaaacgggaatatcttcacataaaaactaaacagaagcattgtcagaaaattctgggtgatgtttgcattcaaatcccagagttgaaccttcctttgatagttcaggtttgaaacactctttttgtaggatctgcaagtggatatttggaccactctgtggccttcgttcgaaacgggtacatcttcgcataaaatctagacagaagcattctcagaaaatactttgtgatgattgagttgatctcacagagctgaacattcctttggatggagcaggtttgagacacactttttgtagaatctacaagtggatatttggacctctctgaggatttcgttggtaacgggataactgcacctaactaaacggaagcattctcagaaactgctttgtgatgattgcattcacctcacagagttgaacattcctattgatagagcagtttggaaacactcttgttgtggaatgtgcaagtggagatttggagcgctttgaggcctatggtagtaaagggaatagcttcatagaaaaactagacagatgcattctcaggaactttttggtgatgtttgtattcaactcccagagttgaactttcctttggaaagagcagctatgaaacactctttttctagaatctgcaagtggacgtttggagggctttgtggtttgtggtggaaaaggaaatatcttcacctaaatactagatagaagcattctcagaagcttctctgtgatgactgcattcaactcacggagttgaacactccttttgagagcgcagttttgaaactctctttctgtggcatctgcaaggggacatgtagacctctttgaagatttcgttggaaacggaatcatcttcacataaaaactatacagaagcagtctcagaatcttctttgtgatgtttgcattcaaatccccgagttgaactttcctttcaaagttcacgtttgaaacactctttttgcgggatctacaagtggatatttggaccactctgtgtccttcgttcgaaacgggtatatcttcacatgacatctagacagaagctttctcagaaaattctttgggatgattgagttgaactcacagagctgagcattccttgcgatgtagcagtttagaaacacactttctgcagaatctgcaagtgcatatttggacctctgtgaggaattcgttggaaacgggataatttcagctgactaaacagaagcattctcagaaccttcttcgtgatgtctgcattcaactcacagtgtggaacctttctttgatagttcaggtttgaaacactctttttgtagaaactgcaaggggataattgcactctttgaggagtaccgtagtaaaggaaataacttcctataaaaagaagacagaagcattctcagaaccctcttcgtgatgtttgcattcaactcacagtgctgaacctttctttgatagttcagctttgaaacactctttttgtagaaactgcaagtggatatttggtcctctctgagcatttcgttggaaacgggataaactgcacagaactaaacagaagcattctcagaaccttcttcgtgatgtttgcattcaactcacagtgttgaacctttctttgatagttcaggtttgaaacggtctttctgtagaaactgcaagtagatatttggacctctctgaggatttcgttggaaacgggataacccgcacagaactaaaacagaagcattcacagaaaactcttggtgacgactgagtttaactcacaggagctgaacattcctttggatggagcagtttcgaaacacactatttgtagaatgtgcaagtggatatttaggcctctctgaggatttcgttggaaatgggataaaccgcacagaactaaacagaagcattctcagaaactactttgtgatgattgcattcaagtcacagagttgaacattccctttgacagagcagtttggaaactctctttgtgtagaatctgcaagtggagatatggaccgctttgaggcctatggtagtaaaggaaatagcttcatataaaagctagacagtagcattctcagaaacttctttgtgatgcttgcattcaactcacagagttgaactttcctttcgagagagaagctttgaaacactctttttccagaatctgcaagtggacatttggagggctttgaggcctgtggtggaaaaggaattatcttcccgtaaaagctagatagaagcattgtcagaaacttctttgtgatgattgcattcaactcacagagttgaaggttccttttcaaagagcagtttccaatcactctttctgtggaatctgcaagtggatatttggacctattttgaagatttcgttggaaacgggagaatcttcacaggaaagctaaacagaagcattctcagaaacttctctgtgatgtttgtgttcaactcccagagtttcacattgcttttcatagagtagttctgaaacatgcttttcgtagtgtctacaagtggacatttggagcgctttcaggcctgtggtggaaaacgaattatggtcacataaaaactggagagaagccttctcagaaacttctctgtgatgattgcattcaactcacagagttgaaccctcctatggatagagcagtgttgaaactctctttttgtggaatctgcaagtggatatgtggacctctccgaagatgtctttggaaacgggaatatcttcacataaaaactaaacagaagcattctcagaaacttcttggtgatgtttgcattcaaatcccagagttgaaccttcctttgatagttcaggtttgaaacactctttttgtaggatctgcaagtggatatttggaccactctgtggccttcgttcgaaacgggtatatcttcgcataaaatctagacagaagcattctcagaaaatactttgtgatgattgagtttaactcacagagctgaacattcctttggatggagcaggtttgagactcaccttttgtagaatctacaagtggatatttggacctctctgaggatttcgttggaaacgggataactgcacctaactaaacggaagcattctcagaaactgctttgtgatgattgcattcacctcacagagttgaacattcctattgatagagcagtttggaaacactcttgttgtggaatgtgcaagtggagatttggagcgctttgaggtctatggtagtaaagggaatagcttcatagaaaaactagacagatgcattctcaggaactttttggtgatgtttgtattcaactcccagagttgaactttcctttggaaagagcagctatgaaacactgtttttctagaatctgcaagtggacgtttggagggctttgtggtttgtggtggaaaaggaaatatcttcacctaaatactagatagaagcatcctcagaagcttctctgtgatgactgcattcaactcacggagttgaacactccttttgagagcgcagttttgaaactctctttctgtggcatctgcaaggggacatgtagacctctttgaagatttcgttggaaacggaatcatcttcacataaaaactacacagaagcagtctcagaatcttctttgtgatgtttgcattcaaatccccgagttgaactttcctttcaaagttcacgtttgaaacactctttttgcaggatctacaagtggatatttggaccactctgtgtccttcgttcgaaacaggtatatcttcacatgacatctagacagaagctttctcagaaaattctttgggatgattgagttgaactcacagagctgagcattccttgcgatgtagcagtttagaaacacactttctgcagaatctgcaagtgcatatttggacctctgtgaggaattcgttggaaacgggataatttcagctgactaaacagaagcattctcagaaccttcttcgtgatgtctgcattcaactcacagtgtggaacctttctttgatagttcaggtttgaaacactctttctgtagaaactgcaaggggataattgcactctttgaggagtaccgtagtaaaggaaataacttcctataaaaagaagacagaagcattctcagaaccctcttcgtgatgtttgcattcaactcacagtgctgaacctttctttgatagttcagctttgaaacactctttttgtagaaactgcaagtggatatttggtcctctctgaggatttcgttggaaacgggataaactgcacagaactaaacagaagcattctcagaaccttcttcgtgatgtttgcattcaactcacagtgttgaacctttctttgatagttcaggtttgaaacggtctttctgtagaaactgcaagtagatatttggacctctctgaggatttcgttggaaacgggataacccgcacagaactaaaacagaagcattcacagaaaactcttggtgacgactgagtttaactcacagagctgaacattcctttggatggagcagtttcgaaacacactatttgtagaatgtgcaagtggatatttaggcctctctgaggatttcgttggaaatgggataaaccgcacagaactaaacagaagcattctcagaaactactttgtgatgattgcattcaagtcacagagttgaacattccctttgacagagcagtttggaaactctctttgtgtagaatctgcaagtggagatatggaccgctttgaggcctatggtagtaaaggaaatagcttcatataaaagctagacagtagcattctcagaaacttctttgtgatgcttgcattcaactcacagagttgaactttcctttcgagagagaagctttgaaacactctttttccagaatctgcaagtggacatttggagggctttgaggcctgtggtggaaaaggaattatcttcccgtaaaagctagatagaagcattgtcagaaacttctttgtgatgattgcattcaactcacagagttgaaggttccttttcaaagagcagtttccaatcactctttgtgtggaatctgcaagtggatatttggacctattttgaagatttcgttggaaacgggagaatcttcacaggaaagctaaacagaaagcattctcagaaacttctctgtgatgtttgtgttcaactcccagagtttcacattgcttttcatagagtagttctgaaacatgcttttcgtagtgtctacaagtggacatttggagcgctttcaggcctgtggtggaaaacgaattatggtcacataaaaactggagagaagccttctcagaaacttctctgtgatgactgcattcaactcacagagttgaaccctcctatggatagagcagtgttgaaactctctttttgtggaatctgcaagcggatatgtggacctctccgaagatgtctttggaaacgggaatatcttcacataaaaactaaacagaagcattctcagaaacttcttggtgatgtttgcattcaaatcccagagttgaaccttcctttgatagttcaggtttgaaacactctttttgtaggatcttcaagtggatatttgtaccactctgtggccttcgttcgaaaagggtatatcttcgcataaaatctagacagaagcattctcagaaaatactttgtgatgattgagtttaactcacagagctgaacattcctttggatggagcaggtttgagacacactttttgtagaatctacaagtggatatttggacctctctgaggatttcgttggaaacgcgataactgcacctaactaaacggaagcattctcagaaactgctttgtgatgattgcattcacctcacagagtggaacattcctattgatagagcagtttggaaacactcttgttgtggaatgtgcaagtggagatttggagcgctttgaggcctatggtagtaaagggaatagcttcatagaaaaactagacagatgcattctcaggaacttttttttgatgtttgtattcaactcccagagttgaactttcctttggaaagagcagctatgaaacactctttttctagaatctgcaagtggacgtttggagggctttgtggtttgtggtggaaaaggaaatatcttcacctaaatactagatagaagcattctcagaagcttctctgtgatgactgcattcaactcacggagttgaacactccttttgagagcgcagttttgaaactctctttctgtggcatctgcaaggagacatgtagacctctttgaagatttctttggaaacggaatcatcttcacataaaaactatacagaagcagtctcagaatcttctttgtgatgtttgcattcaaatcccagagttgaactttcctttcaaagttcacgtttgaaacactctttttgcaggatctacaagtggatatttggaccactctgtgtccttcgttcgaaacgggtatatcgtcacacgacatctagactagaagctttctcagaaaattctttgggatgattgagttgagcaaacagagctgaacactccttgcgatgtagcagtttagaaacacactttctgcagaatctgcaagtgcatatgtggacctctctgaggaattcgttggaaacgggataatttcagctgactaaacagaagcattctcagaaccttcttcgtgatgtctgcattcaactcacagtgtggaacctttctttgatagttcaggtttgaaacattctttttgtagaaactgcaaggggatcattgcacttctttgaggcctaccgtagtaaaggaaataacttcctataaaaagaagacagaagcattctcagaaccctcttcgtgatgtttgcattcaactcacagtgctgaacctttctttgatagttcagctttgaaacactctttttgtagaaactgcaaatggatatttggtcctctctgaggatttctttggaaaagggataaaacgcacagaactaaacagaagcattctcagaaccttcttcgtgatgtttgcattcaactcacagtgttgaacctttctttgatagttcaggtttgaaacggtctttctgcagaaactgcaagtagatatttggaccgctctgaggatttcgttggaaacgggataacccgcacagaactaaaacagaagcattcacagaaaactcttggtgacgactgagtttaactcacagagctgaacattcctttcgatggagcagtttggaaacacactatttgtagaatgtgcaagtggatatttaggcctctctgaggatttcgttggaaacgggataaaccgcacagaactaaacagaagcattctcagaaactactttgtgatgattgcattcaagtcacagagttgaacattccctttgacagagcagtttggaaactctctttgtgtagaatctgcaagtggagatatggaccgctttgaggcctatggtagtaaaggaaatagcttcatataaaagctagacagtagcattctcagaaacttctttgtgatgcttgcattcaactcacagagttgaactatcctttcgagagagaagctttgaaatactctttttccagaatctgcaagtggacatttggagggctttgaggcctgtggtggaaaaggaattatcttcctgtaaaagctagatagaagcattgtcagaaacttctttgtgatgattgcattcaactcacagagttgaaggttccttttcaaagagcagtttccaatcactctttctgtggaatctgcaagtggatatttggacctctttgaagatttcgttggaaacgggagaatcttcacagaaaagctaaacagaagcattctcagaaacttctctgtgatgtttgtgttcaacttccagagtttcacattgcttttcatagagtagttctgaaacatgcttttcgtagtgtctgcaagtggacatttggagcgctttcaggcctgtggtggaaaacgaattatggtcacataaaaactggagagaagccttctcagaaacttctctgtgatgattgcattcaactcacagagttgaaccctcctatggatagagcagtgttgaaactctctttttgtggaatctgcaagtggatatgtggacctctccgaagatgtctttggaaacgggaatatcttcacataaaaactaaacagaagcattctcagaaacttcttggtgatgtttgcattcaaatcccagagttgaaccttcctttgatagttcaggtttgcaacactctttttgtaggatctgcaagtggatatttggaccactctgtggccttcgttcgaaacgggtatatcttcgcataaaatctagacagaagcattctcagaaaatactttgtgatgattgagttgaactcacagagctgaacattcctttggatggagcaggtttgagacacactttttgtagaatctacaagtggatatttggacctctctgaggatttcgttggaaacgggataactgcacctaactaaacggaagcattctcagaaactgctttgtgatgattgcattcacctcacagagttgaacattcctattgatagagcagtttggaaacactcttgttgtggaatgtgcaagtggagatttggagcgctttgaggcctatggtagtaaagggaatagcttcatagaaaaactagacagatgcattctcaggaacttttcggtgatgtttgtattcaactcccggagttgaactttcctttggaaagagcagctatgaaacactctttttctagaatctgcaagtggacgtttggagggctttgtggtttgtggtggaaaaggaaatatcttcacctaaatactagatagaagcattctcagaagcttctctgtgatgactgcattcaactcacggagttgaacactccttttgagagcgcagttttgaaactctctttctgtggcatctgcaaggggacatgtagacctctttgaagatttcgttggaaacggaatcatcttcacataaaaactatacagaagcagtctcagaatcttctttgtgatgtttgcattcaaatcccagagttgaactttcctttcaaagttcacgtttgaaacactctttttgcaggatctacaagtggatatttggaccactctgtgtccttcgttcgaaacgggtatatcttcacacgacatctagacagaagctttctcagaaaattctttgggatgattgagtggaactcacagagctgaacattccttgcgatgtagcagtttagaaacacactttctgcagaatctgcaagtgcatatttggacctctctgaggaattcgttggaaacgggataatttcagctgactaaacagaagcattctcagaaccttcttcgtgatgtctgcattcaactcacagtgtggaacctttctttgatagttcaggtttgaaacactctttttgtagaaactgcaaggggataattgcacttctttgaggcctaccgtagtaaaggaaataacttcctatagaaagaagacagaagcattctcagaaccctcttcgtgatgtttgcattcaactcacagtgctgaacctttctttgatagttcagctttgaaacactcttcttgtagaaactgcaagtggatatttggtcctctctgaggatttcgttggaaacgggataaaccgcacagaactaaacagaagaattctcagagccctcttcgtgatgtttgcattcaactcacagtgctgaacctttctttgatagtgcagctttgaaacactctttttgtagaaactgcaagtggatgtttggtcctctctgaggatttcgttggaaacgggataaaccgcacagaactaaaacagaagcattgtcagaaacttctttgtgatgattgcattcaactcacagagttgaaggttccttttcaaacagcagtttccaatcactctttctgtggaatctgcaagtggatatttgggcctctctgaggatttcgttggaaacgggataaaacgcacagaactaaaacagaagcattctcagaaacttctctgtgatgtttgtgttcaactcccagagtttcacgttgcttttcatagagtagttctgaaacatgcttttcgtagtgtctgcaagtggacatttggagcgctttcaggcctgtggtggaaaacgaattatggtcacataaaaactggagagaagccttctcagaaacttctctgtgatgattgcattcaactcacagagttgaaccctcctatggatagagcagtgttgaaactctctttttgtggaatctgcaagtggatatgtggacctctccgaagatgtctttggaaacgggaatatcttcacataaaaactaaacagaagcattctcagaaacttcttggtgatgtttgcattcaaatcccagagttgaaccttcctttgatagttcaggtttgaaacactctttttgtaggatctgcaagtggatatttggaccacactgtggccttcgttcgaaacgggtacatcttcgcataaaatctagacagaagcattctcagaaaatactttgtgatgattgagttgaactcacagagctgaacattcctttggatggagcaggtttgagacacactttttgtagaatctacaagtggatatttggacctctctgaggatttcgttggaaacgggataactgcacctaactaaacggaagcattctcagaaactgctttgtgatgattgcattcacctcacagagttgaacattcctattgatagagcagtttggaaacactcttgttgtggaatgtgcaagtggagatttggagcgctttgaggcctatggtagtaaagggaatagcttcatagaaaaactagacagatgcattctcaggaactttttggtgatgtttgtattcaactcccagagttgaactttcctttggaaagagcagctatgaagcactctttttctagaatctgcaagtggacgtttggagggctttgtggtttgtggtggaaaaggaaatatcttcacctaaatactagagagaagcattctcagaagcttctctgtgatgactgcattcaactcacggagttgaacactccttttgagagcgcagttttgaaactctctttctgtggcatctgcaaggggacatgtagacctctttgaagatttcgttggaaacggaatcatcttcacatcaaaactatacagaagcagtctcagaatcttctttgtgatgtttgcattcaaatcccagagttgaactttcctttcaaagttcacgtttgaaacactctttttgcaggatctacaagtggatatttggaccactctgtgtccttcgttcgaaacgggtatatcttcacatgacatctagacagaagctttctcagaaaattctttgggatgattgagttgagcaaacagagctgaacactccttgcgatgtagcagtttagaaacacactttctgcagaatctgcaagtgcatatgtggacctctctgaggaattcgttggaaacgggataatttcagctgactaaacagaagcattctcagaaccttcttcgtgatgtctgcattcaactcacagtgtggaacctttctttgatagttcaggtttgaaacactctttttggagaaactgcaaggggatcattgcacttctttgaggcctaccgtagtaaaggagataacttcctataaaaagaagacagaagcattctcagaaccctcttcgtgatgtttgcattcaactcacggtgctgaacctttctttgatagttcagctttgaaacactctttttgttgaaactgcaattggatatttggtcctctctgaggatttcgttggaaacgggataaaccgcacagaactaaacagaagcattctcagaaccttcttcgtgatgtttgcattcaactcacagtgttgaacctttctttgatagttcaggtttgaaacggtctttctgtagaaactgcaagtagacatttggacctctctgaggatttcgttggaaacgggataaaccgcacacaactaaaacagaagcattcacagaaaactcttggtgacgactgagtttaactcacagaactgaacattcctttggatggagcagtttcgaaacacactatttgtagaatgtgcaagtggatatgtgggcctctctgaggatttcgttggaaacgggataaaccgcacagaactaaacagaagcattctcagaaactacgttgtgatgattgcattcaagtcacagagctgaacattccctttgacagagcagtttggaaactctctttgtgtagaatctgcaagtggagatatggaccgctttgaggcctatggtagtaaaggaaatagcttcatataaaagctagacagtagcatcctcagaaacttctttgtgatgcttgcattcaactcacagagttgaactttcctttcgagagagaagctttgaaacactctttttccagaatctgcaagtggacatttggagggctttgaggcctgtggtggaaaaggaattatcttcccgtaaaagctagatagaagcattgtcagaaacttctttgtgatgattgcattcaagtcacagagttgaaggttcctttacaaagagcagtttccaatcactctttctgtggaatctgcaagtggatatttggacctctttgaagatttcgttggaaacgggagaatcttcacagaaaagctaaacagaagcattctcagaaacttctctgtgatgtttttgttcaactcccagagtttcacattgcttctcatagagtagttctgaaacatgcttttcgtagtgtctgcaagtggacatttggagcgctttcaggtctgtggtggaaaacgaattatggtcacataaaaactggagagaagccttctcagaaacttctctgtgatgattgcattcaactcacagagttgaaccctcctatggatagagcagtgttgaaactctctttttgtggaatctgcaagcggatatgtggacctctccgaagatgtctttggcaacgggaatatcttcacataaaaactaaacagaagcattctcagaaacttcttcgtgatgtttgcattcaaatcccagagttgaaccttcctttgagagttcaggtttgaaacactctttttgtaggatctgcaagtggatatttggaccactctgtggccttcgttcgaaacgggtacatcttcgcataaaatctagacagaagcattctcagaaaatactttgtgatgattgagttgaactcacagagctgaacattcctttggatggagcaggtttgagacacactttttgtagaatctacaagtggatatttggacctctctgaggatttcgttggaaacgggataactgcacctaactaaacggaagcattctcagaaactgctttgtgatgattgcattcacctcacagagttgaacattcctattgatagagcagtttggaaacactcttcttgtggaatgtgcaagtggagatttggagcgctttgaggcctatggtagtaaagggaatagcttcatagaaaaactaggcagatgcattctcaggaactttttggtgatgtttgtattcaactcccagagttgaactttcctttggaaagagcagctatgaaacactctttttctaaaatctgcaagtggacgtttggagggctttgtggtttgtggtggaaaaggaaatatcttcacctaaatactagatagaagcattctcagaagcttctctgtgatgactgcattcagctcacggagttgaacactccttttgagagcgcagttttgaaactctctttctgtggcatctgcaaggggacatgtagacctctttgaagatttcgttggaaacggaatcatcttcacatcaaaactatacagaagcagtctcagaatcttctttgtgatgtttgcattcaaatcccagagttgaactttcctttcaaagttcacgtttgaaacactctttttgcaggatctacaagtggatatttggaccactctgtgtccttcgttcgaaacgggtatatcttcacaggacatctagacagaagctttctcagaaaattctttgggatgattgagtggaactcacagagctgaacattccttgcgatgtagcagtttagaaacacactttctgcagaatctgcaagtgcatatttggacctctctgaggaattcgttggaaacgggataatttcagctgactaaacagaagcattctcagaaccttcttcgtgatgtctgcattcaactcacagtgtggaacctttctttgatagttcaggtttgaaacactctttttgtagaaactgcaaggggataattgcacttctttgaggcctaccgtagtaaaggaaataacttcctatagaaagaagacagaagcattctcagaaccctcttcgtgatgtttgcattcaactcacagtgctgaacctttctttgatagttcagctttgaaacactcttcttgtagaaactgcaagtggatatttggtcctctctgaggatttcgttggaaacgggataaaccgcacagaactaaacagaagaattctcagagccctcttcgtgatgtttgcattcaactcacagtgctgaacctttctttgatagtgcagctttgaaacactctttttgtagaaactgcaagtggatgtttggtcctctctgaggatttcgttggaaacgggataaaccgcacagaactaaaacagaagcattgtcagaaacttctttgtgatgattgcattcaactcacagagttgaaggttccttttcaaacagcagtttccaatcactctttctgtggaatctgcaagtggatatttgggcctctctgaggatttcgttggaaacgggataaaacgcacagaactaaaacagaagcattctcagaaacttctctgtgatgtttgtgttcaactcccagagtttcacgttgcttttcatagagtagttctgaaacatgcttttcgtagtgtctgcaagtggacatttggagcgctttcaggcctgtggtggaaaacgaattatggtcacataaaaactggagagaagccttctcagaaacttctctgtgatgattgcattcaactcacagagttgaaccctcctatggatagagcagtgttgaaactctctttttgtggaacctgcaagtggatatgtggacctctccgaagatgtctttggaaacgggaatatcttcacataaaaactaaacagaagcattctcagaaacttcttggtgatgtttgcattcaaatcccagagttgaaccttcctttgatagttcaggtttgaaacactctttctgtaggatctgcaagtggctatttggaccactctgtggccttcgttcgaaacgggtatatcttcgcataaaatctagacagaagcattctcagaaaatactttgtgatgattgagtttaaatcacagagctgaccattcctttggatggagcaggtttgagacacactttttgtagaatctacaagtggatatttggacctctctgaggatttcgttggaaacgggataactgcacctaactaaacggaagcattctcagaaactgctttgtgatgattgcattcacctcacagagttgaacattcctattgatagagcagtttggaaacactcttgttgtggaatgtgcaagtggagatttggagcgctttgaggcctatggtagtaaagggaatagcttcatagaaaaactagacagatgcattctcaggaactttttggtgatgtttgtattcaactcccagagttgaactttcctttggaaagagcagctatgaaacactctttttctagaatctgcaagtggacgtttggagggctttgtggtttgtggtggaaaaggaaatatcttcacctaaatactagatagaagcattctcagaagcttctctgtgatgactgcattcaactcacggagttgaacactccttttgagagcgcagttttgaaactctctttctgtggcatccgcaaggggacatgtggacctctttgaagatttcgttggaaacggaatcatcttcacatcaaaactatacagaagcagtctcagaatcttctttgtgatgtttgcattcaaatcccagagttgaactttcctttcaaagttcacgtttgaaacactctttttgcaggatctacaagtggatatttggaccactctgtgtccttcgttcgaaacgggtatatcttcacacgacatctagacagaagctttctcagaaaattctttgggatgattgagtggaactcacagagctgaacattccttgcgatgtagcagtttagaaacacactttctgcagaatctgcaagtgcatatttggacctctctgaggaattcgttggaaacgggataatttcagctgactaaacagaagcattctcagaaccttcttcgtgatgtctgcattcaactcacagtgtggaacctttctttgatagttcaggtttgaaacactctttttgtagaaactgcaaggggataattgcacttctttgaggcctaccgtagtaaaggaaataacttcctatagaaagaagacagaagcattctcagaaccctcttcgtgatgtttgcattcaactcacagtgctgaacctttctttgatagttcagctttgaaacactcttcttgtagaaactgcaagtggatatttggtcctctctgaggatttcgttggaaacgggataaaccgcacagaactaaacagaagaattctcagagccctcttcgtgatgtttgcattcaactcacagtgctgaacctttctttgatagtgcagctttgaaacactctttttgtagaaactgcaagtggatgtttggtcctctctgaggatttcgttggaaacgggataaaccgcacagaactaaaacagaagcattgtcagaaacttctttgtgatgattgcattcaactcacagagttgaaggttccttttcaaacagcagtttccaatcactctttctgtggaatctgcaagtggatatttgggcctctctgaggatttcgttggaaacgggataaaacgcacagaactaaaacagaagcattctcagaaacttctctgtgatgtttgtgttcaactcccagagtttcacgttgcttttcatagagtagttctgaaacatgcttttcgtagtgtctgcaagtggacatttggagcgctttcaggcctgtggtggaaaacgaattatggtcacataaaaactggagagaagccttctcagaaacttctctgtgatgattgcattcaactcacagagttgaaccctcctatggatagagcagtgttgaaactctctttttgtggaatctgcaagtggatatgtggacctctccgaagatgtctttggaaacgggaatatcttcacataaaaactaaacagaagcattctcagaaacttcttggtgatgtttgcattcaaatcccagagttgaaccttcctttgatagttcaggtttgaaacactctttctgtaggatctgcaagtggctatttggaccactctgtggccttcgttcgaaacgggtatatcttcgcataaaatctagacagaagcattctcagaaaatactttgtgatgattgagtttaaatcacagagctgaccattcctttggatggagcaggtttgagacacactttttgtagaatctacaagtggatatttggacctctctgaggatttcgttggaaacgggataactgcacctaactaaacggaagcattctcagaaactgctttgtgatgattgcattcacctcacagagttgaacattcctattgatagagcagtttggaaacactcttgttgtggaatgtgcaagtggagatttggagcgctttgaggcctatggtagtaaagggaatagcttcatagaaaaactagacagatgcattctcaggaactttttggtgatgtttgtattcaactcccagagttgaactttcctttggaaagagcagctatgaaacactctttttctagaatctgcaagtggacgtttggagggctttgtggtttgtggtggaaaaggaaatatcttcacctaaatactagatagaagcattctcagaagcttctctgtgatgactgcattcaactcacggagttgaacactccttttgagagcgcagttttgaaactctctttctgtggcatctgcaaggggacatgtagacctctttgaagatttcgttggaaacggaatcatcttcacataaaaactatacagaagcagtctcagcatcttctttgtgatgtttgcattcaaatcccagagttgaactttcctttcaaagttcacgtttgaaacactctttttgcaggatctacaagtggatatttggaccactctgtgtccttcgttcgaaacgggtatatcttcacatgacatctagacagaagctttctcagaaaattctttgggatgattgagtggaactcacagaagctgaacattccttgcgatgtagcagtttagaaacacactttctgcagaatctgcaagtgcatatgtggacctctctgaggaattcgttggaaacgggataatttcagctgactaaacagaagcattctcagaaccttcttcgtgatgtctgcattcaactcacagtgtggaacctttctttgatagttcaggtttgaaacactctttttgtagaaactgcaaggggatcattgcacttctttgaggcctaccgtagtaaaggagataacttcctataaaaagaagacagaagcattctcagaaccctcttcgtgatgtttgcattcaactcacggtgctgaacctttcttggatagttcagctttgaaacagtctttttgtagaaactgcaagtggatatttggtcctctctgaggatttcgttggaaacgggataaaccgcacagaactaaacagaagcattctcagaaccttcttcgtgatgtttgcattcaactcacagtgttgaacctttctttgatagttcaggtttgaaacggtctttgtgtagagactgcaagtagatatttggacctctctgaggatttcgttggaaacgggataaaccgcacagaactaaaacagaagcattcacagaaaacacttggtgacgactgagtttaactcacagagctgaacattcctttggatggagcagtttcgaaacacactatttgtagaatgtgcaagtggatatgtgggcctctctgaggatttcgttggaaacgggataaaccgcacagaactaaacagaagcattctcagaaactactttgtgatgattgcattcaagtcacagagttgaacattccctttgacagagcagtttggaaactctctttgtgtagaatctgcaagtggagatatggaccgctttgaggcctatggtagtaaaggaaatagcttcatataaaagctagacagtagcattctcagaaacttctttgtgatgcttgcattcaactcacagagttgaactttcctttcgagagagaagctttgaaacactctttttccagaatctgcaagtggacatttggagggctttgaggcctgtggtggaaaaggaattatcttcccgtaaaagctagatagaagcattgtcagaaacttctttgtgatgattgcattcaactcacagagttgaaggttccttttcaaacagcagtttccaatcactctttctgtggaatctgcaagtggatatttggacctctttgaagatttcgttggaaacgggagaatcttcacagaaaagctaaacagaagcattctcagaaacttctctgtgatgtttgtgttcaactcccacagtttcacattgcttctcatagagtagttctgaaacatgcttttcgtagtgtctgcaagtggacatttggagcgctttcaggcctgtggtggaaaatgaattatggtcacataaaaactggagagaagccttctcagaaacttctctgtgatgattgcattcaactcacagagttgaaccctcctatggatagagcagtgttgaaactctctttttgtggaatctgcaagcggatatgtggacctctccgaagatgtctttggaaacgggaatatcttcacataaaaactaaacagaaagattctcagaaacttcttggtgatgtttgcattcaaatcccagagttgaaccttcctttgagagttcaggtttgaaacactctttttgtaggatctgcaagtggctatttggaccactctgtggccttcgttcgaaacgggtatatcttcgcataaaatctagacagaagcattctcagaaaatactttgcgatgattgagttgaactcacagagctgaacattcctttggatggagcaggtttgagacacactttttgtagaatctacaagtggatatttggacctctctgaggatttcgttggaaacgggataactgcacctaactaaacggaagcattctcagaaactgctttgtgatgattgcattcacctcacagagttgaacattcctattgatagagcagtttggaaacactcttcttgtggaatgtgcaagtggagatttggagcgctttgaggcctatggtagtaaagggaatagcttcatagaaaaactagacagatgcattctcaggaactttttggtgatgtttgtattcaactcccagagttgaactttcctttggaaagagcagctatgaaacactctttttctagaatctgcaagtggacgtttggagggctttgtggtttgtggtggaaaaggaaatatcttcacctaaatactagatagaagcattctcagaagcttctctgtgatgactgcattcaactcacggagttgaacactccttttgagagcgcagttttggaactctctttctgtggcatctgcaaggggacatgtagacctctttgaagatttcgttgtaaacggaatcatcttcacataaaaactatacagaagcagtctcagaatcttctttgtgatatttgcattcaaatcccagagttgaactttcctttcaaagttcacgtttgaaacactctttttgcaggatctacaagtggatatttggaccactctgtgtccttcgttcgaaacgggtatatcttcacatgacatctagactgaagctttctcagaaaattctttgggatgattgagttgagcaaacagagctgaacactccttgcgatgtagcagtttagaaacaccctttctgcagaatctgcaagtgcatatgtggacctctctgaggaattcgttggaaacgggataatttcagctgactaaacagaagcattctcagaaccttcttcgtgatgtctgcattcaactcacagtgtggaacctttctttgatagttcaggtttgaaacactctttttgtagaaactgcaaggggatcattgcacttctttgaggcctaccgtagtaaaggaaataacttcctataaaaagaagacagaagcattctcagaaccctcttcgtgatgtttgcattcaactcacggtgctgaacctttctttgatagttcagctttgaaacactctttttgtagaaactgcaagtggatatttggtcccctctgaggatttcgttggaaacgggataaaccgcacagaactaaacagaagcattctcagaaccttcttcgtgatgtttgcattcaactcacagtgttgaacctttctttgatagttcaggttggaaacggtctttctgtagaaactgcaagtagatatttggacctctctgaggatttcgttggaaacgggataaaccgcacagaactaaaacagaagcattcacagaaaactcttggtgacgactgagtttaactcacagagctgaacattcctttggatggagcagtttcgaaacacactatttgtagaatgtgcaagtggatatgtgggcctctctgaggatttcgttggaaacgggataaaccgcacagaactaaacagaagcattctcagaaactactttgtgatgattgcattcaagtcacagagttgaacattccctttgacagagcagtttggaaactctctttgcgtagaatctgcaagtggagatatggaccgctttgaggcctatggtagtaaaggaaatagcttcatataaaagctagacagcagcattctcagaaacttctttgtgatgcttgcattcaactcacagagttgaactttcctttcgagagagaagctttgaaacactctttttccagaatctgcaagtggacatttggagggctttgaggcctgtggtggaaaaggaattatcttcccgtaaaagctagatagaagcattgtcagaaacttctttgtgatgattgcattcaactcacagagttgaaggttccttttcaaacagcagtttccaatcactctttctgtggaatctgcaagtggatatttggacctattttgaagatttcgttggaagcgggagaatcttcacagaaaagttaaacagaagcattctcagaaacttctctgtgatgtttgtgttcaactcccagagtttcacattgcttttcatagagtagttctgaaacatgcttttcgtagtgtctgcaagtggacatttggagcgctttcaggcctgtggtggaaaacgaattatggtcacataaaaactggagagaagccttctcagaaacttctctgtgatgattgcattcaactcacagagttgaaccctcctatggatagagcagtgttgaaactctctttttgtggaatctgcaagtggatatgtggacctctccgaagatgtctttggaaacgggaatatcttcacataaaaactaaacagaagcattctcagaaacttcttggtgatgtttgcattcaaatcccagagtcgaaccttcctttgatagttcaggtttgaaacactctttttgtaggatctgcaagtggatatttggaccactctgtggccttcgttcgaaacgggtatatcttcgcataaaatctagacagaagcattctcagaaaaatactttgtgatgattgagtttaactcacagagctgaacattcctttggatggagcaggtttgagacacactttttgtagaatctacaagtggatatttggacctctctgaggatttcgttggaaacgggataactgcacctaactaaacggaagcattctcagaaactgctttgtgatgattgcattcacctcacagagttgaacattcctattgatagagcagtttggaaacactcttgttgtggaatgtgcaagtggagatttggagcgctttgaggcctatggtagtaaagggaatagcttcatagaaaaactagacagatgcattctcaggaactttttggtgatgtttgtattcaactcccagagttgaactttcctttggaaagagcagctatgaaactctttttctagaatctgcaagtggacgtttggagggctttgtggtttgtggtggaaaaggaaatatcttcacctaaatattagatagaagcattctcagaagcttctctgtgatgactgcattcaactcacggagttgaacactccttttgagagtgcagttttgaaactctctttctgtgggatctgcaaggggacatgtagacctctctgaagatttcgttggaaacggaatcatcttcacataaaaactatacagaagcagtctcagaatcttctttgtgatgtttgcattcaaatcccagagttgaactttcctttcaaagttcacgtttgaaacactctttttgcaggatctacaagtggatatttggaccactctgtgtccttcgttcgaaacgggtatatcttcacatgacatctagacagaagctttctcagaaaattctttgcgatgattgagttgaactcacagagctgaacattccttgcgatgtagcagtttagaaacacactttctgcagaatctgcaagtgcatatttggacctctctgaggaattccttggaaacgggataatttcagctgactaaacagaagcattctcagaaccttcttcgtgatgtctgcattcaactcacagtgtggaatctttctttggtagttcaggtttgaaacactctttttgtagaaactgcaaggggataattgcacttctttgaggcctaccgtagtaaaggaaataacttcgtataaaaagaagacagaagcattctcagaaccctcttcgtgatgtttgcattcaactcacagtgctgaacctttctttgatagttcagctttgaaacactcttcttgtagaaactgcaagtggatatttggtcctctctgaggatttcgttggaaacgggataaaccgcacagaactaaacagaagaattctcagagccctcttcgtgatgtttgcattcaactcacagtgctgaacctttctttgatagtgcagctttgaaacactctttttgtagaaactgcaagtggatatttggtcctctctgaggatttcgttggaaacgggataaaccgcacagaactaaaacagaagcattcacagaaaactcttggtgacgactgagtttaactcacagagctgaacattcctttggatggagcagttttgaaacacactatttgtagaatctgcaagtggatatttgggcctctctgaggatttcgttggaaacgggataaaacgcacagaactaaaacagaagcattctcagaaactactttgtgatgattgcattcaagtcacagagttgaacattccctttgacagagcagtttggaaactctctttgtgtagaatctgcaagtggagatatggaccgctttgaggcctatggtagtaaaggaaatagcttcatataaaagctagacagtaacattctcagaaacttctttgtgatgcttgcattcaactcagagagttgaactttcctttcgagagagaagctttgaaacactctttttccagaatctgcaagtggacatttggagggctttgaggcctgtggtggaaaaggaattaacttcccgtaaaagctagatagaagcattgtcagaaacttctttgtgatgattgcattcaactcacagagatgaaggttccttttcaaacagcagtttccaaacagtctttctgtggaatctgcaagtggatatttggacctctttgaagatttcgttggaaacgggagaatcttcacagaaaagctaaacagaagcattctcagaaacttctctgtgatgtttgtgttcaactcccagagtttcacattgcttttcatagagtagttctgaaacatgcttttcgtagtgtctgcaagtggacatttggagcgctttcaggcctgtggtggaaaacgaattatggtcccataaaaactggagagaagacttctcagaaccttctctgtgatgattgcattcaactcacagatttgaaccctcctatggatagaacagtgttgaaactctctttttgtggaatctgcaagtggatatgtggacctctccgaagatgtctttggaaacgggaatatcttcacctaaaaactaaacagaagcattctcagaaacttcttggtgatgtttgcattcaaatcacagagttgaaccttcctgtgatagttcaggtttgaaacactctttttgtaggatctgcaagtggatatttggaccactctgtggccttcgttccaaacgggtacatcttcacataaaatctagacagaagcattctcagaaaatactttgtgatgattgagtttaaatcacagagctgaccattcctttggatggagcaggtttgagacacactttttgtagaatctacaagtggatatttggacctctctgaggatttcgttggaaacgggataactgcacctaactaaacggaggcattctcagaaactgctttgtgatgattgcattcacctcacagagttgaacattcctattgatagagcagtttggaaacactcttgttgtggaatgtgcaagtggagatttggagcgctttgaggcctgtggtagtaaagggaatagcttcatagaaaaactagacagatgcattctcaggaactttttggtgatgtttgtattcaactcccagagttgaactttcctttggaaagagcagctatgaaacactctttttctagaatctgcaagtggacgtttggagggctttgtggtttgtggtggaaaaggaaatatcttcacctaaatactagatagaagcattctcagaagctcctctgtgatgactgcattcaactcacggagttgaacactccttttgagagcgcagttttgaaactctctttctgtggcatctgcaaggggacatgtagacctctttgaagatttcgttggaaacggaatcatcttcacataaaaactatacagaagcagtctcagaatcttctttgtgatgtttgcattcaaatcccagagttgaactttcctttcaaagttcacgtttgaaacactctttttgcaggatctacaagtggatatttggaccactctgtgtccttcgttcgaaacgggtataacttcacacgacatctagacagaagctttctcagaaaattctttgggatgattgagtggaactcacagagctgaacattccttgcgatgtagcagtttagaaacacactttctgcagaatctgcaagtgcatatttggacctctctgaggaattcgttggaaacgggataatttcagctgactaaacagaagcattctcagaaccttcttcgtgatgtctgcattcaactcacagtgtggaacctttctttgatagttcaggtttgaaacactctttttgtagaaactgcaaggggataattgcacttctttgaggcctaccgtagtaaaggaaataacttcctatagaaagaagacagaagcattctcagaaccctcttcgtgatgtttgcattcaactcacagtgctgaacctttctttgatagttcagctttgaaacactcttcttgtagaaactgcaagtggatatttggtcctctctgaggatttcgttggaaacgggataaaccgcacagaactaaacagaagaattctcagagccctcttcgtgatgtttgcattcaacctcacagtgctgaacctttctttgatagtgcagctttgaaacactctttttgtagaaactgcaagtggatgtttggtcctctctgaggatttcgttggaaacgggataaaccgcacagaactaaaacagaagcattgtcagaaacttctttgtgatgattgcattcaactcacagagttgaaggttccttttcaaacagcagtttccaatcactctttctgtggaatctgcaagtggatatttgggcctctctgaggatttcgttggaaacgggataaaacgcacagaactaaaacagaagcattctcagaaacttctctgtgatgtttgtgttcaactcccagagtttcacgttgcttttcatagagtagttctgaaacatgcttttcgtagtgtctgcaagtggacatttggagcgctttcaggcctgtggtggaaaacgaattatggtcacataaaaactggagagaagccttctcagaaacttctctgtgatgattgcattcaactcacagagttgaaccctcctatggatagagcagtgttgaaactctctttttgtggaatctgcaagtggatatgtggacctctccgaagatgtctttggaaacgggaatatcttcacataaaaactaaacagaagcattctcagaaacttcttggtgatgtttgcattcaaatcccagagttgaaccttcctttgatagttcaggtttgaaacactctttctgtaggatctgcaagtggctatttggaccactctgtggccttcgttcgaaacgggtatatcttcgcataaaatctagacagaagcattctcagaaaatactttgtgatgattgagtttaaatcacagagctgaccattcctttggatggagcaggtttgagacacactttttgtagaatctacaagtggatatttggacctctctgaggatttcgttggaaacgggataactgcacctaactaaacggaagcattctcagaaactgctttgtgatgattgcattcacctcacagagttgaacattcctattgatagagcagtttggaaacactcttgttgtggaatgtgcaagtggagatttggagcgctttgaggcctatggtagtaaagggaatagcttcatagaaaaactagacagatgcattctcaggaaccttttggtgatgtttgtattcaactcccagagttgaactttcctttggaaagagcagctatgaaacactctttttctagaatctgcaagtggacgtttggagggctttgtggtttgtggtggaaaaggaaatatcttcacctaaatactagatagaagcattctcagaaggttctctgtgatgactgcattcaactcacggagttgaacactccttttgagagcgcagttttgaaactctctttctgtggcatctgcaaggggacatgtagacctctttgaagatttcgttggaaacggaatcatcttcacataaaaactatacagaagcagtctcagaatcttctttgtgatgtttgcattcaaatcccagagttgaactttcctttcaaagttcacgtttgaaacactctttttgcaggatctacaagtggatatttggaccactctgtgtccttcgttcgaaacgggtatatcttcacacgacatctagacagaagctttctcagaaaattctttgggatgattgagtggaactcacagagctgaacattccttgcgatgtagcagtttagaaacacactttctgcagaatctgcaagtgcatatttggacctctctgaggaattcgttggaaacgggataatttcagctgactaaacagaagcattctcagaaccttcttcgtgatgtctgcattcaactcacagtgtggatcctttctttgatagttcaggtttgaaacactctttttgtagaaactgcaaggggataattgcacttctttgaggcctaccgtagtaaaggaaataacttccaatagaaagaagacagaagcattctcagaaccctcttcgtgatgtttgcattcaactcacagtgctgaacctttctttgatagttcagctttgaaacactcttcttgtagaaactgcaagtggatatttggtcctctctgaggatttcgttggaaacgggataaaccgcacagaactaaacagaagcattctcagaaccttcttcgtgatgtttgcattcaactcacagtgttgaacctttctttgatagttcaggtttgaaacggtctttctgtagaaactgcaagtagatatttggacctctctgaggatttcgttggaaacgggataaaccgcacagaactaaaacagaagcattcacagaaaactcttggtgacgactgagtttaactcacagagctgaacattcctttggatggagcagtttcgaaacacactatttgtagaatgtgcaagtggatatttgggcctctctgaggatttcgttggaaacgggataaaccgcacagaactaaacagaagcattctcagaaactactttgtgacgattgcattcaagtcacagagttgaacattccctttgacagagcagtttggaaactctctttgtgtagaatctgcaagtggagatatggaccgctttgaggcctatggtagtaaaggtaatagcttcatatgaaagctagacagtagcattctcagaaacttctttttgatgcttgcattcaactcacagagttgaactttcctttcgagagagaagctttgaaacactctttttccagaatctgcaagtggacatttggagggctttgaggcctgtggtggaaaaggaattaacttcccgtaaaagctagatagaagcattgtcagaaacttctttgtgatgattgcattcaactcacagagatgaaggttcctttacaaacagcagtttccaaacactctttctgtggaatctgcaagtggatatttggacctctttgaagatttcgttggaaacgggagaatcttcacagaaaagcgaaacagaagcattctcagaaacttctctgtgatgtttgtgttcaactcccagagtttcacattgcttttcatagagtagttctgaaacatgcttttcgtagtgtctgcaagtggacatttggagcgctttcaggcctgtggtggaaaacgaattatggtcccataaaaactggagagaagccttctcagaaacttctctgtgatgattgcattcaactcacagatttgaaccctcctatggatagagcattgttgaaactctctttttgtggaatctgcaagtggatatgtggacctctccgaagatgtctttggaaacgggaatatcttcacataaaaactaaacagaagcattctcagaaacttcttggtgatgtttgcattcaaatcccagagttgaaccttcctgtgatagttcaggtttgaaacactctttttgtaggatctgcaagtggatatttggaccactctgtggccttcgttcgaaacgggtacatcttcacataaaatctagacagaagcattctcagaaaatactttgtgatgattgagtttaactcacagagctgaacattcctttggatggagcaggtttgagacacactttttgtagaatctacaagtggatatttggacctctctgaggatttcgttggaaacgcgataactgcacctaactaaacggaagcattctcagaaactgctttgtgatgattgcattcacctcacagagttgaacattcctattgatagagcagtttggaaacactcttgttgtggaatgtgcaagtggagatttggagcgctttgaggcctatggtagtaaagggaatagcttcatagaaaaactagacagatgcattctcaggaactttttggtgatgtttgtattcaactcccagagttgaactttcctttggaaagagcagctatgaaacactctttttctagaatctgcaagtggacgtttggagggctttgtggtttgtggtggaaaaggaaatatcttcacctaaatactagagagaagcattctcagaagcttctctgtgatgactgcattcaactcacggagttgaacactccttttgagagcgcagttttgaaactctctttctgtggcatctgcaaggggacatgtagacctctttgaagatttcgttggaaacggaatcatcttcacatagaaactatacagaagcagtctcagaatcttctttgtgatgtttgcattcaaatcccagagttgaactttcctttcaaagttcacgtttgaaacactctttttgcaggatctacaagtggatatttggaccactctgtgtccttcgttcgaaacgggtatatcttcacatgacatctagacagaagctttctcagaaaattctttgggatgattgagtggaactcacagagctgtacattccttgcgatgtagcagtttagaaacacactttctgcagaatctgcaagtgcatatttggacctctctgaggaattcgttggaaacgggataatttcagctgactaaacagaagcattctcagaaccttcttcgtgatgtctgcattcaactcacagtgtggaacctttctttgatagttcaggtttgaaacactctttttgtagaaactgcaaggggataattgcacttctttgaggcctaccgtagtaaaggaaataacttcctatagaaagaagacagaagcattctcagaaccctcttcgtgatgtttgcattcaactcacagtgctgaacctttctttgatagttcagctttgaaacactcttcttgtagaaactgcaagtggatatttggtcctctctgaggatttcgttggaaacgggataaaccgcacagaactaaacagaagcattctctgaaccttcttcgtgatgtttgcattcaactcacagtgttgaacctttctttgatagttcaggttggaaacggtctttctgtagaaactgcaagtagatatttggacctctctgaggatttcgttggaaacgggataaaccgcacagaactaaaacagaagcattcacagaaaactcttggtgacgactgagtttaactcacagagctgaacattcctttggatggagcagtttcgaaacacactatttgtagaatgtgcaagtggatatttgggcctctctgaggatttcgctggaaacgggataaaccgcacagaactaaacagaagcattctcagaaactactttgtgatgattgcattcaagtcacagagttgaacattccctttgacagagcagtttggaaactctctttgtgtagaatctgcaagtggagatatggaccgctttgaggcctattttagtaaaggaaatagcttcatataaaagctagacagtagcattctcagaaacttctttgtgatgcttgcattcaactcacagagttgaactttcctttcgagagagaagctttgaaacactctttttccagaatgtgcaagtggacatttggagggctttgaggcctgtggtggaaaaggaattatcttcccgtaaaagctagatagaagcattgtcagaaacttctttgtgatgattgcattcaactcacagagttgaaggttccttttcaaagagcagtttccaatcactctttctgtggaatctgcaagtggatatttcgacctattttgaagatttcgttggaaacgggataatcttcacagaaaagctaaacagaagcattctcagaaacttctctgtgatgtttgtgttcaactcccagagtttcacattgcttttcatagagtagttctgaaacatgcttttcgtagtgtctacaagtggacatttggagcgcttccaggcctgtggtggaaaacgaattatggtcacataaaaactggagagaagccttctcagaaacttctctgtgatgattgcattcaactcacagagttgaaccctcctatggatagagcagtgttgaaactctctttttgtggaatctgcaagtggatatgtggacctctttgaagatgtctttggaaacgggaatatcttcacataaaaactaaacggaagcattctcagaaacttcttggtgatgtttgcattcaaatcccagagttgaaccttcctttgatagttcaggtttgaaacactctttctgtaggatctgcaagtggctatttggaccactctgtggccttcgttcgaaacgggtatatcttcgcataaaatctagacagaagcattctcagaaaatactttgtgatgattgagtttaaatcacagagctgaccattcctttggatggagcaggtttgagacacactttttgtagaatctacaagtggatatttggacctctctgaggatttcgttggaaacgggataactgcacctaactaaacggaagcattctcagaaactgctttgtgatgattgcattcacctcacagagttgaacattcctattgatagagcagtttggaaacactcttgttgtggaatgtgcaagtggagatttggagcgctttgaggcctatggtagtaaagggaatagcttcatagaaaaactagacagatgcattctcaggaactttttggtgatgtttgtattcaactcccagagttgaactttcctttggaaagagcagctatgaaacactctttttctagaatctgcaagtggacgtttggagggctttgtggtttgtggtggaaaaggaaatatcttcacctaaatactagatagaagcattctcagaagcttctctgtgatgactgcattcaactcacggagttgaacactccttttgagagcgcagttttgaaactctctttctgtggcatctgcaaggggacatgtagacctctttgaagatttcgttggaaacggaatcatcttcacataaaaactatacagaagcagtctcagaatcttctttgtgatgtttgcattcaaatcccagagttgaactttcctttcaaagttcacgtttgaaacactctttttgcaggatctacaagtggatatttggaccactctgtgtccttcgttcgaaacgggaatatcttcacatgacatctagacagaagctttctcagaaaattctttgggatgattgagtggaactcacagagctgaacattccttgcgatgtagcagtttagaaacacactttctgcagaatctgcaagtgcatatttggacctctctgaggaattcgttggaaacgggataatttcagctgactaaacagaagcattctcagaaccttcttcgtgatgtgtgcattcaactcacagtgtggaacctttctttgatagttcaggtttgaaacactctttttgtagaaactgcaaggggataattgcacttctttgaggcctaccgtagtaaaggaaataacttcctatagaaagaagacagaagaattctcagagccctcttcgtgatgtttgcattcaactcacagtgctgaacctttctttgatagtgcagctttgaaacactctttttgtagaaactgcaagtggatgtttggtcctctctgaggatttcgttggaaacgggataaaccgcacagaactaaacagaagcattctcagaaccttcttcgtgatgtttgcattcaactcacactgttgaacctttctttgatagttcaggtttgaaacggtctttctgtagaaactgcaagtagatatttggacctctctgaggatttcgttggaaacgggataaaccgcacagaactaaaacagaagcattcacagaaaactcttggtgacgactgagtttaactcacagagctgaacattcctttggatggatcagtttcgaaacacactatttgtagaatgtgcaagtggatatttgggcctctctgaggatttcgttggaaacgggataaaccgcacagaactaaacagaagcattctcagaaactactttgtgatgattgcattcaagtcacagagttgaacattccctttgacagagcagtttggaaactctctttgtgtagaatctgcaagtggagatatggaccgctttgaggcctatggtagtaaaggaaatagcttcatataaaagctagacagtagcattctcagaaacttctttgtgatgcttgcattcaactcacagagttgaactttcctttcgagagagaagcttcgaaacactctttttccagaatctgcaagtggacatttggagggctttgaggcctgtggtggaaaaggaattatcttcccgtaaaagctagatagaagcattgtcagaaacttctttgtgatgattgcattcaactcacagagttgaaggttccttttcaaagagcagtttccaatcactctttctgtggaatctgcaagtggatatttggacctattttgaagatttcgttggaaacgggagaatcttcacaggaaagctaaacagaagcattctcagaaacttctctgtgatgtttgtgttcaactcccagagtttcacattgcttttcatagagtagttctgaaacatgcttttcgtagtgtctacaagtggacatttggagcgctttcaggcctgtggtggaaaacgaattatggtcacataaaaactggagagaagccttctcagaaacttctctgtgatgattgcattcaactcacagagttgaaccctcctatggatagagcagtgttgaaactctctttttgtggaatctgcaagtggatatgtggacctctccgaagatgtctttggaaacgggaatatcttcacataaaaactaaacagaagcattctcagaaacttcttggtgatgtttgcattcaaatcccagagttgaaccttcctttgatagttcaggtttgaaacactctttttgtaggatctgcaagtggatatttggaccactctgtggccttcgttcgaaacgggtatatcttcgcataaaatctagacagaagcattctcagaaaatactttgtgatgattgagttgaactcacagagctgaacattcctttggatggagcaggtttgagacacactttttgtagaatctacaagtggatatttggacctctctgaggatttcgttggaaacgggataactgcacctaactaaacggaagcattctcagaaactgctttgtgatgattgcattcacctcacagagttgaacattcctattgatagagcagtttggaaacactcttgttgtggaatgtgcaagtggagatttggagcgctttgaggcctatggtagtaaagggaatagcttcatagaaaaactagacagatgcattctcaggaactttttggtgatgtttgtattcaactcccagagttgaactttcctttggaaagagcagctatgaaacactctttttctagaatctgcaagtggacgtttggagggctttgtggtttgtggtggaaaaggaaatatcttcacctaaatactagatagaagcattctcagaagcttctctgtgatgactgcattcaactcacggagttgaacactccttttgagagcgcagttttgaaactctctttctgtggcatctgcaaggggacatgtagacctctttgaagatttcgttggaaacggaatcatcttcacataaaaactatacagaagcagtctcagaatcttctttgtgatgtttgcattcaaatcccagagttgaactttcctttcaaagttcacgtttgaaacactctttttgcaggatctacaagtggatatttggaccactctgtgtccttcgttcgaaacgggtatatcttcacacgacatctagacagaagctttctcagaaaattctttgggatgattgagtggaactcacagagctgaacattccttgcgatgtagcagtttagaaacacactttctgcagaatctgcaagtgcatatttggacctctctgaggaattcgttggaaacgggataatttcagctgactaaacagaagcattctcagaaccttcttcgtgatgtctgcattcaactcacagtgtggaacctttctttgatagttcacgtttgaaacactctttttgtagaaactgcaaggggataattgcacttctttgaggcctaccgtagtaaaggaaataacttcctatagaaagaagacagaagcattctcagaaccctcttcgtgatgtttgcattcaactcacagtgctgaacctttctttgatagttcagctttgaaacactcttcttgtagaaactgcaagtggatatttggtcctctctgaggatttcgttggaaacgggataaaccgcacagaactaaacagaagaattctcagagccctcttcgtgatgtttgcattcaactcacagtgctgaacctttctttgatagtgcagctttgaaacactctttttgtagaaactgcaagtggatgtttggtcctctctgaggatttcgttggaaacgggataaaccgcacagaactaaaacagaagcattgtcagaaacttctttgtgatgattgcattcaactcacagagttgaaggttccttttcaaacagcagtttccaatcactctttctgtggaatctgcaagtggatatttgggcctctctgaggatttcgttggaaacgggataaaacgcacagaactaaaacagaagcattctcagaaacttctctgtgatgtttgtgttcaactcccagagtttcacgttgcttttcatagagtagttctgaaacatgcttttcgtagtgtctgcaagtggacatttggagcgctttcaggcctgtggtggaaaacgaattatggtcacataaaaactggagagaagccttctcagaaacttctctgtgatgattgcattcaactcacagagttgaaccctcctatggatagagcagtgttgaaactctctttttgtggaacctgcaagtggatatgtggacctctccgaagatgtctttggaaacgggaatatcttcacataaaaactaaacagaagcattctcagaaacttcttggtgatgtttgcattcaaatcccagagttgaaccttcctttgatagttcaggtttgaaacactctttctgtaggatctgcaagtggctatttggaccactctgtggccttcgttcgaaacgggtatatcttcgcataaaatctagacagaagcattctcagaaaatactttgtgatgattgagtttaaatcacagagctgaccattcctttggatggagcaggtttgagacacactttttgtagaatctacaagtggatatttggacctctctgaggatttcgttggaaacgggataactgcacctaactaaacggaagcattctcagaaactgctttgtgatgattgcattcacctcacagagttgaacattcctattgatagagcagtttggaaacactcttgttgtggagtgtgcaagtggagatttggagcgctttgaggcctgtggaagtaaagggaatagcttcatagaaaaactagacagatgcattctcaggaactttttggtgatgtttgtattcaactcccagagttgaactttcctttggaaagagcagctatgaaacactctttttctagaatctgcaagtggacgtttggagggctttgtggtttgtggtggaaaaggaaatatcttcacctaaatactagacagaagcattctcagaagcttctctgtgatgactgcattcaactcacggagttgaacactccttttgagagcgcagttttgaaactctctttctgtggcatctgcaaggggacatgtagacctctttgaagatttcgttggaaacggaatcatcttcacataaaaactatacagaagcagtctcagaatcttctttgtgatgtttgcattcaaatcccagagttgaactttcctttcaaagttcacgtttgaaacactctttttgcaggatctacaagtggatatttggaccactctgtgtccttcgttcgaaacgggtatatcttcacacgacatctagacagaagctttctcagaaaattctttgggatgattgagtggaactcacagagctgaacattccttgcgatgtagcagtttagaaacacactttctgcagaatctgcaagtgcatatttggacctctctgaggaattcgttggaaacgggataatttcagctgactaaacagaagcattctcagaaccttcttcgtgatgtctgcattcaactcacagtgtggaacctttctttgatagttcaggtttgaaacactctttttgtagaaactgcaaggggataattgcacttctttgaggcctaccgtagtaaaggaaataacttcctatagaaagaagacagaagcattctcagaaccctcttcgtgatgtttgcattcaactcacagtgctgaacctttctttgatagttcagctttgaaacactcttcttgtagaaactgcaagtggatattttgtcctctctgaggatttcgttgtaaacgggataaaccgcacggaaataaacagaagcattctcagaaccttcttcgtgatgtttgcattcaactcacagggttgaacctttctttgatagttcaggttggaaacggtctttctgtagaaactgcaagtagatatttggacctctctgaggatttcgttggtaacgggataaaccgcacagaactaaaacagaagcattcatagaaaactcttggtgacgactgagtttaactcacagagctgaacattcctttggatggagcagtttcgaaacacactatttgtagaatgtgcaagtggatatttgggcctctctgaggattttgttggaaaccggataaaccgcacagaactaaacagaagcattctcagaaactactttgtgatgattgcattcaagtcacagagttgaacattccctttgacagagcagtttggaaactctctttgtgtagaatctgcaagtggagatatggaccgctttgaggcctatggtagtaaaggaaatagcttcatataaaagctagacagtagcattctcagaaacttctttgtgatgcttgcattcaactcacagagttgaactttcctttcgagagagaagctttgaaacactctttttccagaatgtgcaagtggacattttgggagctttgaggcctgtggtggaaaaggaattatcttcccgtaaaagctagatagaagcattgtcagaaacttctttgtgatgattgcattcaactcacagagttgaaggttccttttcaaacagcagtttccaatcactctttctgtggaatctgcaagtggatatttcgacctctttgaagatttcgttggaaacgggagaatcttcacagaaaagctcaacagaagcattctcagaaacttctctgtgatgtttgtgttcaactcccagagtttcacgttgcttttcatagagtagttctgaaacatgcttttcgtagtgtctgcaagtggacatttggagcgctttcaggcctgtggtggaaaacgaattatggtcacataaaaactggagagaagccttctcagaaacttctctgtgatgattgcattcaactcacagagttgaaccctcctatggatagagcagtgttgaaactctctttttgtggaatctgcaagtggatatgtggacctctccgaagatgtctttggaaacgggaatatcttcacataaaaactaaacagaagcattctcagaaacttcttggtgatgtttgcattcaaatcccagagttgaaccttcctttgatagttcaggtttgaaacactctttctgtaggatctgcaagtggctatttggaccactctgtggccttcgttcgaaacgggtatatcttcgcataaaatctagacagaagcattctcagaaaatactttgtgatgattgagtttaaatcacagagctgaccattcctttggatggagcaggtttgagacacactttttgtagaatctacaagtggatatttggacctctctgaggatttcgttggaaacgggataactgcacctaactaaacggaagcattctcagaaactgctttgtgatgattgcattcacctcaccagagttgaacattcctattgatagagcagtttggaaacactcttgttgtggaatgtgcaagtggagatttggagcgctttgaggcctatggtagtaaagggaatagcttcatagaaaaactagacagatgcattctcaggaactttttggtgatgtttgtattcaactcccagcagttgaactttcctttggaaagagcagctatgaaacactctttttctagaatctggaagtggacgtttggagggctttgtggtttgtggtggaaaaggaaatatcttcacctaaatactagatagaagcatcctcagaagcttctctgtgatgactgcattcaactcacggagttgaacactccttttgagagcgcagttttgaaactctctttctgtggcatctgcaaggggacatgtagacctctttgaagatttactttggaaacggaatcatcttcacataaaaactatacagaagcagtctcagaatcttctttgtgatgtttgcattcaaatcccagagttgaactttcctttcaaagttcacgtttgaaacactctttttgcaggatctacaagtggatatttggaccactctgtgtccttcgttcgaaacgggtatatcttcacacgacatctagacagaagctttctcagaaaattctttgggatgattgagtggaactcacagagctgaacattccttgcgatgtagcagtttagaaacacactttctgcagaatctgcaagtgcatatttggacctctctgaggaattcgttggaaacgggataatttcagctgactaaacagaagcattctcagaaccttcttcgtgatgtctgcattcaactcacagtgtggaacctttctttgatagttcaggtttgaaacactctttttgtagaaactgcaaggggataattgcacttctttgaggcctaccgtagtaaaggaaataacttcctatagaaagaagacagaagcattctcagaaccctcttcgtgatgtttgcattcaactcacagtgctgaacctttctttgatagttcagctttgaaacactcttcttgtagaaactgcaagtggatatttggtcctctctgaggatttcgttggaaacgggataaaccgcacagaactaaacagaagaattctcagagccctcttcgtgatgtttgcattcaactcacagtgctgaacctttctttgatagtgcagctttgaaacactctttttgtagaaactgcaagtggatgtttggtcctctctgaggatttcgttggaaacgggataaaccgcacagaactaaaacagaagcattgtcagaaacttctttgtgatgattgcattcaactcacagagttgaaggttccttttcaaacagcagtttccaatcactctttctgtggaatctgcaagtggatatttgggcctctctgaggatttcgttggaaacgggataaaacgcacagaactaaaacagaagcattctcagaaacttctctgtgatgtttgtgttcaactcccagagtttcacgttgcttttcatagagtagttctgaaacatgcttttcgtagtgtctgcaagtggacatttggagcgctttcaggcctgtggtggaaaacgaattatggtcacataaaaactggagagaagccttctcagaaacttctctgtgatgattgcattcaactcacagagttgaaccctcctatggatagagcagtgttgaaactctctttttgtggaatctgcaagtggatatgtggacctctccgaagatgtctttggaaacgggaatatcttcacataaaaactaaacagaagcattctcagaaacttcttggtgatgtttgcattcaaatcccagagttgaaccttcctttgatagttcaggtttgaaacactctttctgtaggatctgcaagtggctatttggaccactctgtggccttcgttcgaaacgggtatatcttcgcataaaatctagacagaaagcattctcagaaaatactttgtgatgattgagtttaaatcacagagctgaccattcctttggatggagcaggtttgagacacactttttgtagaatctacaagtggatatttggacctctctgaggatttcgttggaaacgggataactgaacctaactaaacggagcattctcagaaactgctttgtgatgattgtattcacctcacagagttgaacattcctattgatagagcagtttggaaacactcttgttgtggaatgtgcaagtggagatttggagcgctttgaggcctatggtagtaaagggaatagcttcatagaaaaactagacagatgcattctcaggaactttttggtgatgtttgtattcaactcccagagttgaactttcctttggaaagagcagctatgaaacactctttttctagaatctgcaagtggacgtttggagggctttgtggtttgtggtggaaaaggaaatatcttcacctaaatactagacagaagcattctcagaagcttctctgtgatgactgcattcaactcacggagttgaacactccttttgagagcgcagttttgaaactctctttctgtggcatctgcaaggggacatgtagacctctttgaagatttcgttggaaacggaatcatcttcacataaaaactatacagaagcagtctcagaatcttctttgtgatgtttgcattcaaatcccagagttgaactttcctttcaaagttcacgtttgaaacactctttttgcaggatctacaagtggatatttggaccactctgtgtccttcgttcgaaacgggtatatcttcacacgacatctagacagaagctttctcagaaaattctttgggatgattgagtggaactcacagagctgaacattccttgcgatgtagcagtttagaaacacactttctgcagaatctgcaagtgcatatttggacctctctgaggaattcgttggaaacgggataatttcagctgactaaacagaagcattctcagaaccttcttcgtgctgtctgcattcaactcacagtgtggaacctttctttgatagttcaggtttgaaacactctttttgtagaaactgcaaggggataattgcacttctttgaggcctaccgtagtaaaggaaataacttcctatagaaagaagacagaagcattctcagaaccctcttcgtgatgtttgcattcaactcacagtgctgaacctttctttgatagttcagctttgaaacactcttcttgtagaaactgcaagtggatatttggtcctctctgaggatttcgttggaaacgggataaaccgcacagaactaaacagaagaattctcagagccctcttcgtgatgtttgcattcaactcacagtgctgaaactttctttgatagtgcagctttgaaacactctttttgtagaaactgcaagtggatatttggtcctctctgaggatttcgttggaaacgggataaaccgcacagaactaaaacagaagcattcacagaaaactcttggtgacgactgagtttaactcacagagctgaacattcctttggatggagcagtttcgaaacacactatttgtagaatctgcaagtggatatttgggcctctctgaggatttcgttggaaacgggataaaacgcacagaactaaaacagaagcattctcagaaactactttgtgatgattgcattcaagtcacagagttgaacattccctttgacagagcagtttggaaactctctttgtgtagaatctgcaagtggagatatggaccgctttgaggcctatggtagtaaaggaaatagcttcatataaaagctagacagtagcattctcagaaacttctttgtgatgcttgcattcaactcacagagttgaactttcctttcgagagagaagctttgaaacactctttttccagaatgtgcaagtggacatttggggagctttgaggcctgtggtggaaaaggaattatcttcccgtaaaagctagatagaagcattgtcagaaacttctttgtgatgattgcattcaactcacagagttgaaggttccttttcaaacagcagtttccaatcactctttctgtggaatctgcaagtggatatttcgacctctttgaagatttcgttggaaacgggagaatcttcacagaaaagctaaacagaagcattctcagaaacttctctgtgatgtttgtgttcaactcccagagtttcacgttgcttttcatagagtagttctgaaacatgcttttcgtagtgtctgcaagtggacatttggagcgctttcaggcctgtggtggaaaacgaattatggtcacagaaaaactggagagaagccttctcagaaacttctctgtgatgattgcattcaactcacagagttgaaccctcctatggatagagcagtgttgaaactctctttttgtggaatctgcaagtggatatgtggacctctccgaagatgtctttggaaacgggaatatcttcacataaaaactaaacagaagcattctcagaaacttcttggtgatgtttgcattcaaatcccagagttgaaccttcctttgatagttcaggtttgaaacactctttctgtaggatctgcaagtggctatttggaccactctgtggccttcgttcgaaacgggtatatcttcgcataaaatctagacagaagcattctcagaaaatactttgtgatgattgagttaaaatcacagagctgaacattcctttggatggagcaggtttgagacacactttttgtagaatctacaagtggatatttggacctctctgaggatttcgttggaaacgggataactgcacctaactaaacggaagcattctcagaaactgctttgtgatgattgcattcacctcacagagttgaacattcctattgatagagcagtttggaaacactcttgttgtggaatgtgcaagtggagatttggagcgctttgaggcctatggtagtaaagggaatagcttcatagaaaaactagacagatgcattctcaggaaccttttggtgatgtttgtattcaactcccagagttgaactttcctttggaaagagcagctatgaaacactctttttctagaatctgcaagtggacgtttggagggctttgtggtttgtggtggaaaaggaaatatcttcacctaaatactagatagaagcattctcagaagcttctctgtgatgactgcattcaactcacggagttgaacactccttttgagagcgcagttttgaaactctctttctgtggcatctgcaaggggacatgtagacctctttgaagatttcgttggaaacggaatcatcttcacataaaaactatacagaagcagtctcagaatcttctttgtgatgtttgcattcaaatcccagagttgaactttcctttcaaagttcacgtttgaaacactctttttgcaggatctacaagtggatatttggaccactctgtgtccttcgttcgaaacgggtatatcttcacacgacatctagacagaagctttctcagaaaattctttgggatgattgagtggaactcacagagctgaacattccttgcgatgtagcagtttagaaacacactttctgcagaatctgcaagtgcatatttggacctctctgaggaattcgttggaaacgggataatttcagctgactaaacagaagcattctcagaaccttcttcgtgatgtctgcattcaactcacagtgtggaacctttctttgatagttcaggtttgaaacactctttttgtagaaactgcaaggggataattgcacttctttgaggcctaccgtagtaaaggaaataacttcctatagaaagaagacagaaccattctcagaaccctcttcgtgatgtttgcattcaactcacagtgctgaacctttctttgatagttcagctttgaaacactcttcttgtagaaactgcaagtggatatttggtcctctctgaggatttcgttggaaacgggataaaccgcacagaactaaacagaagcattctcagaaccttcttcgtgatgtttgcattcaactcacagtgttgaacctttctttgatagttcaggtttgaaacggtctttctgtagaaactgcaagtagatatttggacctctctgaggatttcgttggaaacgggataaaccgcacagaactaaaacagaagcattcacagaaaactcttggtgacgactgagtttaactcacagagcagaacattcctttggatggagcagtttcgaaacacactatttgtagaatgtgcaagtggatatgtggtcctctctgaggatttcgttggaaacgggataaaccgcacagaactaaacagaagcattctcagaaactactttgtgatgattgcattcaagtcacagagttgaacattccctttgacagagcagtttggaaactctctttgtgtagaatctgcaagtggagatatggaccgctttgaggcctatggtagtaaaggaaatagcttcatataaaagctagacagtagcattctcagaaacttctttgtgatgcttgcattcaactcacagagttgaactttcctttcgagagagaagctttgaaacactctttttccagaatctgcaagtggacatttggagggctttgaggcctgtggtggaaaaggaattatcttcccgtaaaagctagatagaagcattgtcagagacttctttgtgatgattgcattcaagtcacagagttgaaggttccttttcaaagagcagtttccaatcactctttctgtggaatctgcaagtggatatttggacctcctttgaagatttcgttggaaacgggagaatcttcacagaaaagctaaacagaagcattctcagaaacttctctgtgatgtttgtgttcaactcccagagtttcacattgcttttcatagagtagttctgaaacatgcttttcgtagtgtctacaagtggacatttggagcgctttcaggcctgtggtggaaaacgaattatggtcacataaaaactggagagaagccttctcagaaacttctctgtgatgattgcattcaactcacagagttgaaccctcctatggatagagcagtgttgaaactctctttttgtggaatctgcaagtggatacgtggacctctccgaagatgtctttggaaacgggaatatcttcacataaaaactaaacagaagcattctcagaaacttcttggtgatgtttgcattcaaatcccagagttgaaccttcctttgatagttcaggtttgaaacactctttttgtaggatctgcaagtggatatttggaccactctgtggccttcgttcgaaacgggtatatcttcgcataaaatctagacagaagcattctcagaaaatactttgtgatgattgagtttaactcacagagctgaacattcctttggatggagcaggtttgagacacactttttgtagaatctacaagtggatatttggacctctctgaggatttcgttggaaacgggataactgcacctaactaaacagaagcattctcagaaactgctttgtgatgattgcattcacctcacagagttgaacattcctattgatagagcagtttggaaacactcttgttgtggaatgtgcaagtggagatttggagcgctttgaggcctatggtagtaaagggaatagcttcatagaaaaactagacagatgcattctcaggaactttttggtgatgtttgtattcaactcccagagttgaactttcctttggaaagagcagctatgaaacactctttttctagaatctgcaagtggacgtttggagggctttgtggtttgtggtggaaaaggaaatatcttcacctaaatactagatagaagcattctcagaagcttctctgtgatgactgcattcaactcacggagttgaacactccttttgagagcgcagttttgaaactctctttctgtggcatctgcaaggggacatgtagacctctttgaagatttcgttggaaacggaatcatcttcacataaaaactatacagaagcagtctcagaatcttctttgtgatgtttgcattcaaatcccagagttgaactttcctttcaaagttcacgtttgaaacactctttttgcaggatctacaagtggatatttggaccactctgtgtccttcgttcgaaacgggtatatcttcacacgacatctagacagaagctttctcagaaaattctttgggatgattgagtggaactcacagagctgaacattccttgcgatgtagcagtttagaaacacactttctgcagaatctgcaagtgcatatttggacctctctgaggaattcgttggaaacgggataatttcagctgactaaacagaagcattctcagaaccttcttcgtgatgtctgcattcaactcacagtgtggaacctttctttgatagttcaggtttgaaacactctttttgtagaaactgcaaggggataattgcacttctttgaggcctaccgtagtaaaggaaataacttcctatagaaagaagacagaagcattctcagaaccctcttcgtgatgtttgcattcaactcacagtgctgaacctttctttgatagttcagctttgaaacactcttcttgtagaaactgcaagtggatatttggtcctctctgaggatttcgttggaaacgggataaaccgcacagaactaaacagaagaattctcagagccctcttcgtgatgtttgcattcaactcacagtgctgaacctttctttgatagtgcagctttgaaacactctttttgtagaaactgcaagtggatgtttggtcctctctgaggatttcgttggaaacgggataaaccgcacagaactaaaacagaagcattgtcagaaacttctttgtgatgattgcattcaactcacagagttgaaggttccttttcaaacagcagtttccaatcactctttctgtggaatctgcaagtggatatttgggcctctctgaggatttcgttggaaacgggataaaacgcacagaactaaaacagaagcattctcagaaacttctctgtgatgtttgtgttcaactcccagagtttcacgttgcttttcatagagtagttctgaaacatgcttttcgtagtgtctgcaagtggacatttggagcgctttcaggcctgtggtggaaaacgaattatggtcacataaaaactggagagaagccttctcaggaaacttctctgtgatgattgcattcaactcacagagttgaaccctcctatggatagagcagtgttgaaactctctttttgtggaatctgcaagtggatatgtggacctctccgaagatgtctttggaaacgggaatatcttcacataaaaactaaacagaagcattctcagaaacttctttgtgatatttgcattcaaatcccagagttgaaacttcctttgataggtcaggtttgaaacactctttctgtacgatctgcaagtggatatttggaccactctgtggccttcgttcgaaacgggtacatcttcacataacatctagacagaagcattctcagaaaatactttgtgatgattgagttgaactcacagagctgaacattcctttggatggagcaggcttgagacacagtttttgtagaatctacaagtggatatttggacctctctgaggatttcgttggaaacgggataactgcacctaactaaacggaagcattctcagaaactgctttgtgatgattgcattcacctcacagagttgaacattcctattgatagagcagtttggaaacactcttgttgtggaatgtgcaagtggagatttggagcgctttgaggcctatggtagtaaagggaatagcttcatagaaaaactagacagatgcattctcaggaactttttggtgatgtttgtattcaaatcccagagttgaactttcctttggaaagagcagctatgaaacactctttttctagaatctgcaagtggacgtttggagggctttgtgggttatggtggaaaaggaaatatcttcacctaattactagatagaagcattctcagaagcttctctgtgatgactgcattcaactcacggagttgaacactccttttgagagcgcagttttgaaactctctttctgtggcatccgcaaggggacatgtggacctctatgaagatttcgttggaaacggaatcatcttcacataaaaactatacagaagcagtctcagaatcttctttgtgatgtttgcattcaaatcccagagttgaactttcctttcaaagttcacgtttgaaacactctttttgcaggatctacaagtggatatttggaccactctgtgtccttcgttcgaaacgggtatatcttcacaggacatctagacagaagctttctcagaaaattctttgggatgattgagtggaactcacagagctgaacattccttgcgatgtagcagtttagaaacacactttctgcagaatctgcaagtgcatatttggacctctctgaggaattcgttggaaacgggataatttcagctgactaaacagaagcattctcagaaccttcttcgtgatgtctgcattcaactcacagtgtggaacctttctttgatagttcaggtttgaaacactctttttgtagaaactgcaaggggataattgcacttctttgaggcctaccgtagtaaaggaaataacttcctatagaaagaagacagaagcattctcagaaccctcttcgtgatgtttgcattcaactcacagtgctgaacctttctttgatagttcagctttgaaacactcttcttgtagaaactgcaagtggatatttggtcctctctgaggatttcgttggaaacgggataaaccgcacagaactaaacagaagaattctcagagccctcttcgtgatgtttgcattcaactcacagtgctgaacctttctttgatagtgcagctttgaaacactctttttgtagaaactgcaagtggatgtttggtcctctctgaggatttcgttggaaacgggataaaccgcacagaactaaaacagaagcattgtcagaaacttctttgtgatgattgcattcaactcacagagttgaaggttccttttcaaacagcagtttccaatcactctttctgtggaatctgcaagtggatatttgggcctctctgaggatttcgttggaaacgggataaaacgcacagaactaaaacagaagcattctcagaaacttctctgtgatgtttgtgttcaactcccagagtttcacgttgcttttcatagagtagttctgaaacatgcttttcgtagtgtctgcaagtggacatttggagcgctttcaggcctgtggtggaaaacgaattatggtcacataaaaactggagagaagccttctcagaaacttctctgtgatgattgcattcaactcacagagttgaaccctcctatggatagagcagtgttgaaactctctttttgtggaatctgcaagtggatatgtggacctctccgaagatgtctttggaaacgggaatatcttcacataaaaactaaacagaagcattctcagaaacttcttggtgatgtttgcattcaaatcccagagttgaaccttcctttgatagttcaggtttgaaacactctttctgtaggatctgcaagtggctatttggaccactctgtggccttcgttcgaaacgggtatatcttcgcataaaatctagacagaagcattctcagaaaatactttgtgatgattgagtttaaatcacagagctgaccattcctttggatggagcaggtttgagacacactttttgtagaatctacaagtggatatttggacctctctgaggatttcgttggaaacgggataactgcacctaactaaacggaagcattctcagaaactgctttgtgatgattgcattcacctcacagagttgaacattcctattgatagagcagtttggaaacactcttgttgtggaatgtgcaagtggagatttggagcgctttgaggcctatggtagtaaagggaatagcttcatagaaaaactagacagatgcattctcaggaactttttggtgatgtttgtattcaactcccagagttgaactttcctttggaaagagcagctatgaaacactctttttctagaatctgcaagtggacgtttggagggctttgtggtttgtggtggaaaaggaaatatcttcacctaaatactagatagaagcattctcagaagcttctctgtgatgactgcattcaactcacggagttgaacactccttttgagagcgcagttttgaaactctctttctgtggcatctgcaaggggacatgtagacctctttgaagatttcgttggaaacggaatcatcttcacataaaaactatacagaagcagtctcagaatcttctttgtgatgtttgcattcaaatcccagagttgaactttcctttcaaagttcacgtttgaaacactctttttgcaggatctacaagtggatatttggaccactctgtgtccttcgttcgaaacgggtatatcttcacacgacatctagacagaagctttctcagaaaattctttgggatgattgagtggaactcacagagctgaacattccttgcgatgtagcagtttagaaacacactttctgcagaatctgcaagtgcatatttggacctctctgaggaattcgttggaaacgggataatttcagctgactaaacagaagcattctcagaaccttcttcgtgatgtctgcattcaactcacagtgtggaacctttctttgatagttcaggtttgaaacactctttttgtagaaactgcaaggggataattgcacttctttgaggcctaccgtagtaaaggaaataacttcctatagaaagaagacagaagcattctcagaaccctcttcgtgatgtttgcattcaactcacagtgctgaacctttctttgatagttcagctttgaaacactcttcttgtagaaactgcaagtggatatttggtcctctctgaggatttcgttggaaacgggataaaccgcacagaactaaacagaagaattctcagagccctcttcgtgatgtttgcattcaactcacagtgctgaacctttctttgatagtgcagctttgaaacactctttttgtagaaactgcaagtggatgtttggtcctctctgaggatttcgttggaaacgggataaaccgcacagaactaaaacagaagcattgtcagaaacttctttgtgatgattgcattcaactcacagagttgaaggttccttttcaaacagcagtttccaatcactctttctgtggaatctgcaagtggatatttgggcctctctgaggatttcgttggaaacgggataaaacgcacagaactaaaacagaagcattctcagaaacttctctgtgatgtttgtgttcaactcccagagtttcacgttgcttttcatagagtagttctgaaacatgcttttcgtagtgtctgcaagtggacatttggagcgctttcaggcctgtggtggaaaacgaattatggtcacataaaaactggagagaagccttctcagaaacttctctgtgatgattgcattcaactcacagagttgaaccctcctatggatagagcagtgttgaaactctctttttgtggaacctgcaagtggatatgtggacctctccgaagatgtctttggaaacgggaatatcttcacataaaaactaaacagaagcattctcagaaacttcttggtgatgtttgcattcaaatcccagagttgaaccttcctttgatagttcaggtttgaaacactctttctgtaggatctgcaagtggctatttggaccactctgtggccttcgttcgaaacgggtatatcttcgcataaaatctagacagaagcattctcagaaaatactttgtgatgattgagtttaaatcacagagctgaccattcctttggatggagcaggtttgagacacactttttgtagaatctacaagtggatatttggacctctctgaggatttcgttggaaacgggataactgcacctaactaaacggaagcattctcagaaactgctttgtgatgattgcattcacctcacagagttgaacattcctattgatagagcagtttggaaacactcttgttgtggaatgtgcaagtggagatttggagcgctttgaggcctatggtagtaaagggaatagcttcatagaaaaactagacagatgcattctcaggaactttttggtgatgtttgtattcaactcccagagttgaactttcctttggaaagagcagctatgaaacactctttttctagaatctgcaagtggacgtttggagggctttgtggtttgtggtggaaaaggaaatatcttcacctaaatactagatagaagcattctcagaagcttctctgtgatgactgcattcaactcacggagttgaacactccttttgagagcgcagttttgaaactctctttctgtggcatccgcaaggggacatgtggacctctttgaagatttcgttggaaacggaatcatcttcacataaaaactatacagaagcagtctcagaatcttctttgtgatgtttgcattcaaatcccagagttgaactttcctttcaaagttcacgtttgaaacactctttttgcaggatctacaagtggatatttggaccactctgtgtcctccgttcgaaacgggtatatcttcacatgacatctagacagaagttttctcagaaaattctttgggatgattgagtggaactcacagagctgaacattccttgcgatgtagcagtttagaaacacactttctgcagaatctgcaagtgcatatttggacctctctgaggaattcgttggaaacgggataatttcagctgactaaacagaagcattctcagaaccttcttcgtgatgtctgcattcaactcacagtgtggaacctttctttgatagttcaggtttgaaacactctttttgtagaaactgcaaggggataattgcacttctttgaggcctaccgtagtaaaggaaataacttcctatagaaagaagacagaagcattctcagaaccctcttcgtgatgtttgcattcaactcacagtgctgaacctttctttgatagttcagctttgaaacactcttcttgtagaaactgcaagtggatatttggtcctctctgaggatttcgttggaaacgggataaaccgcacagaactaaacagaagcattctcagaacttcttcgtgatgtttgcattcaactcacagtgttgaacctttctttgatagttcaggttggaaacggtctttctgtagaaactgcaagtagatatttggacctctctgaggatttcgttggaaacgggataaaccgcacagaactaaaacagaagcattcacagaaaactcttggtgacgactgagtttaactcatagagctgaacattcctttggatggagcagtttcgaaacacactatttgtagaatgtgcaagtggatatttgggcctctctgaggatttcgttggaaacgggataaaccgcacagaactaaacagaagcattctcagaaactactttgtgatgattgcattcaagtcacagagctgaacattccctttgacagagcagtttggaaactctctttgtgtagaatctgcaagtggagatatggaatgctttgaggactatggtagtaaaggaaatagcttcatataaaagctagacagtagcattctcagaaacttctttgtgatgcttgcattcaactcacagagttgaactttcctttcgagagagaagcttcgaaacactctttttccagaatctgcaagtggacatttggagggctttgaggcctgtggtggaaaaggaattatcttcccgtaaaagctagatagaagcattgtcagaaacttctttgtgatgattgcattcaactcacagagttgaaggttcctttttaaacagcggtttccaaacactctttctgtggaatctgcacgtggatgtatggacctctttgaagatttcgttggaaacgggagaatcttcacagaaaagctaaacagaagcattctcagaaacttctctgtgatgtttgtgttcaactcccagagtttcacattgcttttcatagagtagttctgaaacatgcttttcgtagtgtctgcaagtggacatttggagcgctttcaggcctgtggtggaaaacgaattatgttcacataaaaactggagagaagccttctcagaaacttctctgtgatgattgcattcaactcacagagttgaaccctcctatggatagagcagtgttgaaactctctttttgtggaatctgcaagtggatatgtggacctctccgaagatgtctttggaaacgggaatatcttcacataaaaactaaacagaagcattctcagaaacttcttggtgatgtttgcattcaaatcccagagttgaaccttcctttgatagttcaggtttgaaacactctttctgtaggatctgcaagtggctatttggaccactctgtggccttcgttcgaaacgggtatatcttcgcataaaatctagacagaagcattctcagaaaatactttgtgatgattgagtttaactcacagagctgaaaattcctttggatggagcaggtttgagacacactttttatagaatctacaagtggatatttggacctctctgaggatgtcgttggaaacgggataactgcacctaactaaacggaagcattctcagaaactgctttgtgatgattgcattcacctcacagagttgaccattcctattgatagagcagtttggaaacactcttgttgtggaatgtgcaagtggagatttggagcgctttgaggcctatggtagtaaagggaatagcttcatagaaaaactagacagatgcattctcaggaactttttggtgatgtttgtattcaactcccagagttgaactttcctttggaaagagcagctatgaaacaccctttttctagaatctgcaagtggacgtttggagggctttgtggtttgtggtggaaaaggaaatatcttcacctaaatactagacagaagcattctcagaagcttctctgtgatgactgcattcaactcacggagttgaacactccttttgagagcgcagttttgaaactctctttctgtggcatctgcaaggggacatgtagacctctttgaagatttcgttggaaacggaatcatcttcacataaaaactatacagaagcagtctcagaatcttctttgtgatgtttgcattcaaatcccagagttgaactttcctttcaaagttcacgtttgaaacactctttttgcaggatctacaagtggatatttggaccactctgtgtccttcgttcgaaacgggtatatcttcacacgacatctagacagaagctttctcagaaaattctttgggatgattgagtggaactcacagagctgaacattccttgcgatgtagcagtttagaaacacactttctgcagaatctgcaagtgcatatttggacctctctgaggaattcgttggaaacgggataatttcagctgactaaacagaagcattctcagtaaccttcttcgtgatgtctgcattcaactcacagtgtggaacctttctttgatagttcaggtttgaaacactctttttgtagaaactgcaaggggataattgcacttctttgaggcctaccgtagtaaaggaaataacttcctataaaaagaagacagaagcattctcagaaccctcttggtgatgtttgcattcaactcacggtgctgaacgtttctttgatagttcagctttgaaacactctttttgtagaaactgcaagtggatatttggtcctctctgaggatttcgttggaaacgggataaaccgcacagaactaaacagaagcattctcagaaccttcttcgtgatgtttgcattcaactcacagtgttgaacctttctttgatagttcatgtttgaaacggtctttctgtagaaactgcaagtagatatttggacctctctgaggatttcgttggaaacgggataaaccgcacagaactaaaacagaagcattcacagaaaactcttggtgacgactgagtttaactcacagagctgaacattcctttggatggagcagtttcgaaacacactatttgtagaatgtgcaagtggatatttgggcctctctgaggatttcgttggaaacgggataaaccgcacagaactaaacagaagcattctcagaaactactttgtgatgattgcattcaagtcacagagttgaacattccctttgacagagcagtttggaaactctctttgtgtaaaatctgcaagtggagatatggaccgctttgaggcctatggtagtaaaggaaatagcttcatataaaagctagacagtagcattctcagaaacttctttgtgatgcttgcattcaactcacagagttgaactttcctttcgagagagaagctttgaaacactctttttccagaatctgcaagtggacatttggagggctttgaggcctgtggtggaaaaggaattatcttcccgtaaaagctagatagaagcattgtcagaaactactttgtgatgattgcattcaactcacagagttgaaggttccttttcaaacagcagtttccaatcactctttctgtggaatctgcaagtggatatttggacctctttgaagatttcgttggaaacgggagaatcttcacagaaaagctaaacagaagcattctcagaaacttctctgtgatgtttgtgttcaactcccagaatttcacattgcttttcatagagtagttctgaaacatgcttttcgtagtgtctgcaagtggacatttggagcgctttcaggcctgtggtggaaaacgaattatggtcacataaaaactggagagaagacttctcagaaacttctctgtgatgattgcattcaactcacagagttgaaccctcctatggatagagcagtgttgaaactctctttttgtggaatctgcaagtggatatgtggacctctccgaagatgtctttggaaacgggaatatcttcacataaaaactaaacagaagcattctcagaaacttcttggtgatgtttgcattcaaatcccagagttgaaccttcctttgatagttcaggtttgaaacactctttttgtaggatctgcaagtggatatttggaccaccctgtggccttcgttcgaaacgggtacatcttcgcataaaatctagacagaagcattctcagaaaatactttgtgatgattgagttgaactcacagagctgaacattcctttggatggagcagtttcgaaacatactatttgtagaatctgcaagtggatatgtgggcctctctgaggatttcgttggaaacgggataaatcgcacagaactaaacagaagcattctcagaaactgctttgtgatgattgcattcacctcacagagttgaacattcctattgatagagcagtttggaaacactcttgttgtggaatgtgcaagtggagatttggagcgctttgaggcctatggtagtaaagggaatagcttcatagaaaaactagacagatgcattctcaggaaccttttggtgatgtttgtattcaactcccagagttgaactttcctttggaaagagcagctatgaaacactctttttctagaatctgcaagtggacgtttggagggctttgtggtttgtggtggaaaaggaaatatcttcacctaaatactagatagaagcattctcagaagcttctctgtgatgactgcattcaactcacggagttgaacactccttttgagagcgcagttttgaaactctctttctgtggcatctgcaaggggacatgtagacctctttgaagatttcgttggaaacggaatcatcttcacataaaaactatacagaagcagtctcagaatcttctttgtgatgtttgcattcaaatcccagagttgaactttcctttcaaagttcacgtttgaaacactctttttgcaggatctacaagtggatatttggaccactctgtgtccttcgttcgaaacgggtatatcttcacacgacatctagacagaagctttctcagaaaattctttgggatgattgagtggaactcacagagctgaacattccttgcgatgtagcagtttagaaacacactttctgcagaatctgcaagtgcatatttggacctctctgaggaattcgttggaaacgggataatttcagctgactaaacagaagcattctcagaaccttcttcgtgatgtctgcattcaactcacagtgtggaacctttctttgatagttcaggtttgaaacactctttttgtagaaactgcaaggggataattgcacttctttgaggcctaccgtagtaaaggaaataacttcctatagaaagaagacagaagcattctcagaaccctcttcgtgatgtttgcattcaactcacagtgctgaacctttctttgatagttcagctttgaaacactcttcttgtagaaactgcaagtggatatttggtcctctctgaggatttcgttggaaacgggataaaccgcacagaactaaacagaagaattctcagagccctcttcgtgatgtttgcattcaactcacagtgctgaacctttctttgatagtgcagctttgaaacactctttttgtagaaactgcaagtggatgtttggtcctctctgaggatttcgttggaaacgggataaaccgcacagaactaaaacagaagcattgtcagaaacttctttgtgatgattgcattcaactcacagagttgaaggttccttttcaaacagcagtttccaatcactctttctgtggaatctgcaagtggatatttgggcctctctgaggatttcgttggaaacgggataaaacgcacagaactaaaacagaagcattctcagaaacttctctgtgatgtttgtgttcaactcccagagtttcacgttgcttttcatagagtagttctgaaacatgcttttcgtagtgtctgcaagtggacatttggagcgctttcaggcctgtggtggaaaacgaattatggtcacataaaaactggagagaagccttctcagaaacttctctgtgatgattgcattcaactcacagagttgaaccctcctatggatagagcagtgttgaaactctctttttgtggaatctgcaagtggatatgtggacctctccgaagatgtctttggaaacgggaatatcttcacataaaaactaaacagaagcattctcagaaacttcttggtgatgtttgcattcaaatcccaggagttgaaccttcctttgatagttcaggtttgaaacactctttttgtaggatctgcaagtggctatttggaccactctgtggccttcgttcgaaacgggtatatcttcgcataaaatctagacagaagcattctcagaaaatactttgtgatgattgagtttaaatcacagagctgaacattcctttggatggagtaggtttgagacacactttttgtagaatctacaagtggatatttggacctctctgaggatttcgttggaaacgggataactgcacctaactaaacggaagcattctcagaaactgctttgtgatgattgcattcacctcacagagttgaacattcctattgatagagcagtttggaaacactcttgttgtggaatgtgcaagtggagatttggagcgctttgaggcctatggtagtaaagggaatagcttcatagaaaaactagacagatgcattctcaggaaccttttggtgatgtttgtattcaactcccagagttgaactttcctttggaaagagcagctatgaaacactctttttctagaatctgcaagtggacgtttggagggctttgtggtttgtggtggaaaaggaaatatcttcacctaaatactagatagaagcattctcagaagcttctctgtgatgactgcattcaactcacggagttgaacactccttttgagagcgcagttttgaaactctctttctgtggcatctgcaaggggacatgtagacctctttgaagatttcgttggaaacggaatcatcttcacataaaaactatacagaagcagtctcagaatcttctttgtgatgtttgcattcaaatcccagagttgaactttcctttcaaagttcacgtttgaaacactctttttgcaggatctacaagtggatatttggaccactctgtgtccttcgttcgaaacgggtatatcttcacacgacatctagacagaagctttctcagaaaattctttgggatgattgagtggaactcacagagctgaacattccttgcgatgtagcagtttagaaacacactttctgcagaatctgcaagtgcatatttggacctctctgaggaattcgttggaaacgggataatttcagctgactaaacagaagcattctcagaaccttcttcgtgatgtctgcattcaactcacagtgtggaacctttctttgatagttcaggtttgaaacactctttttgtagaaactgcaaggggataattgcacttctttgaggcctaccgtagtaaaggaaataacttcctatagaaagaagacagaagcattctcagaaccctcttcgtgatgtttgcattcaactcacagtgctgaacctttctttgatagttcagctttgaaacactcttcttgtagaaactgcaagtggatatttggtcctctctgaggatttcgttggaaacgggataaaccgcacagaactaaacagaagaattctcagagccctcttcgtgatgtttgcattcaactcacagtgctgaacctttctttgatagtgcagctttgaaacactctttttgtagaaactgcaagtggatgtttggtcctctctgaggatttcgttggaaacgggataaaccgcacagaactaaaacagaagcattgtcagaaacttctttgtgatgattgcattcaactcacagagttgaaggttccttttcaaacagcagtttccaatcactctttctgtggaatctgcaagtggatatttgggcctctctgaggatttcgttggaaacgggataaaacgcacagaactaaaacagaagcattctcagaaacttctctgtgatgtttgtgttcaactcccagagtttcacgttgcttttcatagagtagttctgaaacatgcttttcgtagtgtctgcaagtggacatttggagcgctttcaggcctgtggtggaaaacgaattatggtcacataaaaactggagagaagccttctcagaaacttctctgtgatgattgcattcaactcacagagttgaaccctcctatggatagagcagtgttgaaactctctttttgtggaatctgcaagtggatatgtggacctctccgaagatgtctttggaaacgggaatatcttcacataaaaactaaacagaagcattctcagaaacttcttggtgatgtttgcattcaaatcccagagttgaaccttcctttgatagttcaggtttgaaacactctttctgtaggatctgcaagtggctatttggaccactctgtggccttcgttcgaaacgggtatatcttcgcataaaatctagacagaagcattctcagaaaatactttgtgatgattgagtttaaatcacagagctgaccattcctttggatggagcaggtttgagacacactttttgtagaatctacaagtggatatttggacctctctgaggatttcgttggaaacgggataactgcacctaactaaacggaagcattctcagaaactgctttgtgatgattgcattcacctcacagagttgaacattcctattgatagagcagtttggaaacactcttgttgtggaatgtgcaagtggagatttggagcgctttgaggcctgtggtagcaaagggaatagcttcatagaaaaactagacagatgcattctcaggaactttttggtgatgtttgtattcaactcccagagttgaactttcctttggaaagagcagctatgaaacactctttttctagaatctgcaagtggacgtttggagggctttgtggtttgtggtggaaaaggaaatatcttcacctaaatactagatagaagcattctcagaagcttctctgtgatgactgcattcaactcacggagttgaacactccttttgagagcgcagttttgaaactctctttctgtggcatctgcaaggggacatgtagacctctttgaagatttcgttggaaacggaatcatcttcacataaaaactatacagaagcagtctcagaatcttctttgtgatgtttacattcaaatcccagagttgaactttcctttcaaagttcacgtttgaaacactctttttgcaggatctacaagtggatatttggaccactctgtgtccttcgttcgaaacgggtatatcttcacatgacatctagacagaagctttctcagaaaattctttgggatgattgagtggaactcacagagctgaacattccttgcgatgtagcagtttagaaacacactttctgcagaatctgcaagtgcatatttggacctctctgaggaattcgttggaaacgggataatttcagctgactaaacagaagcattctcagaaccttcttcgtgatgtctgcattcaactcacaagtgtggaacctttctttgatagttcaggtttgaaacactctttttgtagaaactgcaaggggataattgcacttctttgaggcctaccgtagtaaaggaaataacttcctatagaaagaagacagaagcattctcagaaccctcttcgtgatgtttgcattcaactcacaagtgctgaacctttctttgatagttcagctttgaaacactcttcttgtagaaactgcaagtggatatttggtcctctctgaggatttcgttggaaacgggataaaccgcacagaactaaacagaagaattctcagagccctcttcgtgatgtttgcattcaactcacagtgctgaacctttctttgatagtgcagctttgaaacactctttttgtagaaactgcaagtggatgtttggtcctctctgaggatttcgttggaaacgggataaaccgcacagaactaaaacagaagcattgtcagaaacttctttgtgatgattgcattcaactcacagagttgaaggttccttttcaaacagcagtttccaatcactctttctgtggaatctgcaagtggatatttgggcctctctgaggatttcgttggaaacgggataaaacgcacagaactaaaacagaagcattctcagaaacttctctgtgatgtttgtgttcaactcccagagtttcacgttgcttttcatagagtagttctgaaacatgcttttcgtagtgtctgcaagtggacatttggagcgctttcaggcctgtggtggaaaacgaattatggtcacataaaaactggagagaagcattctcagaaaatactttgtgatgattgagttaaaatcacagagctgaacattcctttggatggagcaggtttgagacacactttttgtagaatctacaagtggatatttggacctctctgaggatttcgttggaaacgggataactgcacctaactaaacggaagcattctcagaaactgctttgtgatgattgcattcacctcacagagttgaacattcgtattgatagagcagtttggaaacactcttcttgtggaatgtgcaagtggagatttggagcgctttggggcctatggtagtaaagggaatagcttcatagaaaaactagacagatgcattctcaggaattttttggtgatgtttgtgttcaactcccagagttgaactttcctttggaaagagcagctatgaaacactctttttctagaatctgcaagtggacgtttggagggctttgtggtttgtggtggaaaaggaaatatcttcacctaaatactagatagaagcatcctcagaagcttctctgtgatgactgcattcaactcacggagttgaacactccttttgagagcgcagttttgaaactctctttctgtggcatctgcaaggggacatgtagacctactttgaagatttcgttggaaacggaatcatcttcacataaaaactacacagaagcagtctcagaatcttctttgtgatgtttgcattcaaatcccagagttgaactttcctttcaaagttcacgtttgaaacactctttttgcaggatctacaagtggatatttggaccactctgtgtccttcgttcgaaacgggtatatcttcacacgacatctagacagaagctttctcagaaaattctttgggatgattgagtggaactcacagagctgaacattccttgcgatgtagcagtttagaaacacactttctgcagaatctgcaagtgcatatttggacctctctgaggaattcgttggaaacgggataatttcagctgactaaacagaagcattctcagaaccttcttcgtgatgtctgcattcaactcacagtgtggaacctttctttgatagttcaggtttgaaacactctttttgtagaaactgcaaggggataattgcacttctttgaggcctaccgtagtaaaggaaataacttcctatagaaagaagacagaagcattctcagaaccctcttcgtgatgtttgcattcaactcacagtgctgaacctttctttgatagttcagctttgaaacactcttcttgtagaaactgcaagtggatatttggtcctctctgaggatttcgttggaaacgggataaaccgcacagaactaaacagaagaattctcagagccctcttcgtgatgtttgcattcaactcacagtgctgaacctttctttgatagtgcagctttgaaacactctttttgtagaaactgcaagtggatgtttggtcctctctgaggatttcgttggaaacgggataaaccgcacagaactaaaacagaagcattgtcagaaacttctttgtgatgattgcattcaactcacagagttgaaggttccttttcaaacagcagtttccaatcactctttctgtggaatctgcaagtggatatttgggcctctctgaggatttcgttggaaacgggataaaacgcacagaactaaaacagaagcattctcagaaacttctctgtgatgtttgtgttcaactcccagagtttcacgttgcttttcatagagtagttctgaagcatgcttttcgtagtgtctgcaagtggacatttggagcgctttcaggcctgtggtggaaaacgaattatggtcacataaaaactggagagaagccttctcagaaacttctctgtgatgattgcattcaactcacagagttgaaccctcctatggatagagcagtgttgaaactctctttttgtggaatctgcaagtggatatgtggacctctccgaagatgtctttggaaacgggaatatcttcacataaaaactaaacagaagcattctcagaaacttcttggtgatgtttgcattcaaatcccagagttgaaccttcctttgatagttcaggtttgaaacactctttctgtaggatctgcaagtggctatttggaccactctgtggccttcgttcgaaacgggtatatcttcgcataaaatctagacagaagcattctcagaaaatactttgtgatgattgagtttaaatcacagagctgaccattcctttggatggagcaggtttgagacacactttttgtagaatctacaagtggatatttggacctctctgaggatttcgttggaaacgggataactgcacctaactaaacggaagcattctcagaaactgctttgtgatgattgcattcacctcacagagttgaacattcctattgatagagcagtttggaaacactcttgttgtggaatgtgcaagtggagatttggagcgctttgaggcctgtggtagcaaagggaatagcttcatagaaaaactagacagaatgcattctcagggaactttttggtgatgtttgtattcaactcccagagttgaactttcctttggaaagagcagctatgaaacactctttttctagaatctgcaagtggacgtttggagggctttgtggtttgtggtggaaaaggaaatatcttcacctaaatactagatagaagcattctcagaagcttctctgtgatgactgcattcaactcacggagttgaacactccttttgagagcgcagttttgaaactctctttctgtggcatccgcaaggggacatgtggacctctttgaagatttcgttggaaatggaatcatcttcacataaaaactatacagaagcagtctcagaatcttctttgtgatgtttgcattcaaatcccagagttgaactttcctttcaaagttcacgtttgaaacactctttttgcaggatctacaagtggatatttggaccactctgtgtccttcgttcgaaacgggtatatcttcacacgacatctagacagaagctttctcagaaaattctttgggatgattgagtggaactcacagagctgaacattccttgcgatgtagcagtttagaaacacactttctgcagaatctgcaagtgcatatttggacctctctgaggaattcgttggaaacgggataatttcagctgactaaacagaagcattctcagaaccttcttcgtgatgtctgcattcaactcacagtgtggaacctttctttgatagttcaggtttgaaacactctttttgtagaaactgcaaggggataattgcacttctttgaggcctaccgtagtaaaggaaataacttcctatagaaagaagacagaagcattctcagaaccctcttcgtgatgtttgcattcaactcacagtgctgaacctttctttgatagttcagctttgaaacactcttcttgtagaaactgcaagtggatatttggtcctctctgaggatttcgttggaaacgggataaaccgcacagaactaaacagaagcattctcagaatcttcttcgtgatgattgcattcaactcacagtgttgaacctttctttgatagttcaggttggaaacggtctttctgtagaaactgcaagtagatatttggacctctctgaggatttcgttggaaacgggataaaccgcacagaactaaaacagaagcattcacagaaaactcttggtgacgactgagtttaactcacagagctgaacattcctttggatggagcagtttcgaaacacactatttgtagaatgtgcaagtggatatttgggcctctctgaggatttcgttggaaacgcgataaaccgcacagaactaaagagaagcattctcagaaactactttgtgatgattgcattcaagtcacagagttgaacattccctttgacagaacagtttggaaactctctttgtgtagaatctgcaagtggagatatggaccgctttgaggcctatggtagtaaaggaaatagcttcatataaaagctagacagtagcattctcagaaacttctttgtgatgcttgcattcaactcacagagttgaactttcctttcgagagagaagctttgaaacactctttttccagaatgtgcaagtggacatttggggagctttgaggcctgtggtggaaaaggaattatcttcccgtaaaagctagatagaagcattgtcagaaacttctttgtgatgattgcattcaactcacagagttgaaggttccttttcaaacagcagtttccaatcactctttctgtggaatctgcaagtggatatttcgacctctttgaagatttcgttggaaacgggagaatcttcacagaaaagctaaacagaagcattctcagaaacttctctgtgatgtttgtgttcaactcccagagtttcacgttgcttttcatagagtagttctgaaacatgcttttcgtagtgtctgcaagtggacatttggagcgctttcaggcctgtggtggaaaacgaattatggtcacataaaaactggagagaagccttctcagaaacttctctgtgatgattgcattcaactcacagagttgaaccctcctatggatagagcagtgttgaaactctctttttgtggaatctgcaagtggatatgtggacctctccgaagatgtctttggaaacgggaatatcttcacataaaaactaaacagaagcattctcagaaacttcttggtgatgtttgcattcaaatcccagagttgaaccttcctttgatagttcaggtttgaaacactctttctgtaggatctgcaagtggctatttggaccactctgtggccttcgttcgaaacgggtatatcttcgcataaaatctagacagaagcattctcagaaaatactttgtgatgattgagtttaaatcacagagctgaccattcctttggatggagcaggtttgagacacactttttgtagaatctacaagtggatatttggacctctctgaggatttcgttggaaacgggataactgcacctaactaaacggaagcattctcagaaactgctttgtgatgattgcattcacctcacagagttgaacattcctattgatagagcagtttggaaacactcttgttgtggaatgtgcaagtggagatttggagcgctttgaggcctatgttagtaaagggaatagcttcatagaaaaactagacagatgcattctcaggaactttttggtgatgtttgtattcaactcccagagttgaactttcctttggaaagagcagctatgaaacactctttttctagaatctgcaagtggacgtttggagggctttgtggtttgtggtggaaaaggaaatatcttcacctaaatactagatagaagcattctcagaagcttctctgtgatgactgcattcaactcacggagttgaacactccttttgagagcgcagttttgaaactctctttctgtggcatccgcaaggggacatgtggacctctttgaagatttcgttggaaacggaatcatcttcacataaaaactatacagaagcagtctcagaatcttctttgtgatgtttgcattcaaatcccagagttgaactttcctttcaaagttcacgtttgaaacactctttttgcaggatctacaagtggatatttggaccactctgtgtccttcgttcgaaacgggtatatcttcacacgacatctagacagaagctttctcagaaaattctttgggatgattgagtggaactcacagagctgaacattccttgcgatgtagcagtttagaaacacactttctgcagaatctgcaagtgcatatttggacctctctgaggaattcgttggaaacgggataatttcagctgactaaacagaagcattctcagaaccttcttcgtgatgtctgcattcaactcacagtgtggaacctttctttgatagttcaggtttgaaacactctttttgtagaaactgcaaggggataattgcacttctttgaggcctaccgtagtaaaggaaataacttcctatagaaagaagacagaagcattctcagaaccctcttcgtgatgtctgcattcaactcacagtgctgaacctttctttgatagttcagctttgaaacactcttcttgtagaaactgcaagtggatatttggtcctctctgaggatttcgttggaaacgggataaaccgcacagaactaaacagaagcattctcaggaaccttcttcgtgatgtttgcattcaactcacagtgttgaacctttctttgatagttcaggtttgaaacggtctttctgtagaaactgcaagtagatatttggacctctctgaggatttcgttggaaacgggataacccgcacagaactaaaacagaagcattcacagaaaactcttggtgacgactgagtttaactcacagagctgaacattcctttggatggagcagtttcgaaacacactatttgtagaatgtgcaagtggatatgtgggcctctctgaggatttcgttggaaacgggataaaccgcacagaactaaacagaagcattctcagaaactactttgtgatgattgcattcaagtcacagagttgaacattccctttgacagagcagtttggaaactctctttgtgtagaatctgcaagtggagatatggaccgctttgaggcctatggtagtaaaggaaatagcttcatataaaagctagacagtagcattctcagaaacttctttgtgatgcttgcattcaactcacagagttgaactttcctttcgagagagaagctttgaaacagtctttttccagaatctgcaagtggacatttggagggctttgaggcctgtggtggaaaaggaattatcttcccgtaaaagctagatagaagcattgtcagaaacttctttgtgatgattgcattcaagtcacagagttgaaggttccttttcaaagagcagtttccaatcactctttctgtggaatctgcaagtggatatttggacctctttgaagatttcgttggaaacgggagaatcttcacagaaaagctaaacagaagcattctcagaaacttctctgtgatgtttgtgttcaactcccagagtttcacattgcttctcatagagtagttctgaaacatgcttttcgtagtgtctgcaagtggacatttggagcgctttcaggcctgtggtggaaaacgaattatggtcacataaaaactggagagaagccttctcagaaacttctctgtgatgattgcattcaactcacagagttgaaccctcctatggatagagcagtgttgaaactctctttttgtggaatctgcaagcggatatgtggacctctccgaagatgtctttggaaacgggaatatcttcacataaaaactaaacagaagcattctcagaaacttcttggtgatgtttgcattcaaatcccagagttgaaccttcctttgagagttcaggtttgaaacactctttttgtaggatctgcaagtggataattggaccactctgtggccttcgttcgaaacgggtacatcttcgcataaaatctagacagaagcattctcagaaaatactttgtgatgattgagttgaactcacagagctgaacattcctttggatggagcaggtttgagacacactttttgtagaatctacaagtggatatttggacctctctgaggatttcgttggaaacgggataactgcacctaactaaacggaagcattctcagaaactgctttgtgatgattgcattcacctcacagagttgaacattcctattgatagagcagtttggaaacactcttcttgtggaatgtgcaagtggagatttggagcgctttgaggcctatggtagtaaagggaatagcttcatagaaaaactagacagatgcattctcaggaactttttggtgatgtttgtattcaactcccagagttgaactttcctttggaaagagcagctatgaaacactctttttctagaatctgcaagtggacgtttggagggctttgtggtttgtggtggaaaaggaaatatcttcacctaaatactagaaagaagcattctcagaagcttctctgtgatgactgcattcaactcacggagttgaacactccttttgagagcgcagttttggaactctctttctgtggcatctgcaaggggacatgtagacctctttgaagatttcgttggaaacggaatcatcttcacatcaaaactatacagaagcagtctcagaatcttctttgtgatgtttgcattcaaatcccagagttgaacttgcctttcaaagttcacgtttgaaacactctttttgcaggatctacaagtggatatttggaccactctgtgtccttcgttcgaaacgggtatatcttcacatgacatctagacagaagctttctcagaaaattctttgggatgattgagttgagcaaacagagctgaacactccttgcgatgtagcagtttagaaacaccctttctgcagaatctgcaagtgcatatgtggacctctctgaggaattcgttggaaacgggataatttcagctgactaaacagaagcattctcagaaccttcttcgtgatgtctgcattcaactcacagtgtggaacttttctttgatagttcaggtttgaaacactctttttgtagaaactgcaaggggatcattgcacttctttgaggcctaccgtagtaaaggaaataacttcctataaaaagaagacagaagcattctcagaaccctcttcgtgatgtttgcattcaactcacggtgctgaacctttctttgatagttcagctttgaaacactctttttgtagaaactgcaagtggatatttggtcctctctgaggatttcgttggaaacgggataaaccgcacagaactaaacagaagcattctcagaaccttcttcgtgatgtttgcattcaactcacagtgttgaacctttctttgatagttcaggtttgaaacggtctttctgtagaaactgcaagtagatatttggacctctctgaggatttcgttggaaacgggataaaccgcacagaactaaaacagaagcattcacagaaaactcttggtgacgactgagtttaactcacagagctgaacattcctttggatggagcagtttcgaaacacactatttctagaaggtgcaagtggatatgtgggcctctctgaggatttcgttggaaacgggataaaccgcacagaactaaacagaagcattctcagaaactactttgtgatgattgcattcaagtcacagagttgaacattccctttgacagagcagtttggaaactctctttgtgtagaatctgcaagtggagatatggaccgctttgaggcctatggtagtaaaggaaatagcttcatataaaagctagacagtagcattctcagaaacttctttgtgatgcttgcattcaactcacagagttgaactttcctttcgagagagaagctttgaaacactctttttccagaatctgcaagtggacatttggagggctttgaggtctgtggtggaaaaggaattatcttcccgtaaaagctagatagaagcattgtcagaaacttctttgtgatgattgcattcaagtcacagagttgaaggttccttttcaaagagcagtttccaatcactctttctgtggaatctgcaagtggatatttggacctctttgaagatttcgttggaaacgggagaatcttcacagaaaagctaaacagaagcattctcagaaacttctctgtgatgtttgtgttcaactcccagaatttcacattgcttctcatagagtagttctgaaacatgcttttcgtagtgtctgcaagtggacatttggagcgctttcaggcctgtggtggaaagcgaattatggtcacataaaaactggagagaagccttctcagaaacttctctgtgatgattgcattcaactcacagagttgaaccctcctatggatagagcagtgttgaaactctctttttgtggaatctgcaagcggatatgtggacctctccgaagatgtctttggcaacgggaatatcttcacataaaaactaaacagaagcattctcagaaacttcttggtgatgtttgcattcaaatcccagagttgaaccttcctttgagagttcaggtttgaaacactctttttgtaggatctgcaagtggatatttggaccactctgtggccttcgttcgaaacgggtacatcttcgcataaaatctagacagaagcattctcagaaaatactttgtgatgattgagttgaactcacagagctgaacattcctttggatggagcaggtttgagacacactttttgtagaatctacaagtggatatttggacctctctgaggatttcgttggaaacgggataactgcacctaactaaacggaagcattctcagaaactgctttgtgatgattgcattcacctcacagagttgaacattcctattgatagagcagtttggaaacactcttcttgtggaatgtgcaagtggagatttggagcgctttgaggcctatggtagtaaagggaatagcttcatagaaaaactagacagatgcattctcaggaactttttggtgatgtttgtattcaactcccagagttgaactttcctttggaaagagcagctatgaaacactctttttctagaatctgcaagtggacgtttggagggctttgtggtttttggtggaaaaggaaatatcttcacctaaatactagatagaagcattctcagaagcttctctgtgatgactgcattcaactcacggagttgaacactccttttgagagcgcagttttggaactctctttctgtggcatctgcaaggggacatgtagacctctttgaagatttcgttggaaacggaatcatcttcacataaaaactatacagaagcagtctcagaatcttctttgtgatgtttgcattcaaatccctgagttgaactttcctttccaagttcacgtttgaaacactctttttgcaggatctacaagtggatatttggaccactctgtgtccttcgttcgaaacgggtatatcttcacatgacatctagacagaagctttctcagaaaattctttgggatgattgagttgagcaaacagagctgaacactccttgtgatgtagcagtttagaaacacactttctgcagaatctgcaagtgcatatgtggacctctctgaggaattcgttggaaacgggataatttcagctgactaaacagaagcattctcagaaccttcttcgtgatgtctgcgttcaactcacagtgtggaacctttctttgatagttcaggtttgaaacactctttttgtagaaactgcaagggaatcattgcacttctttgaggcctaccgtagtaaaggagataacttcctacaaaaagaagacagaagcattctcagaaccctcttcgtgatgtttgcattcaacccacggtgctgaacctttctttgatagttcagctttgaaacactctttttgtagaaactgcaagtggatatttggtcctctctgaggatttcgttggaaacgggataaaccgcacagaactaaacagaagcattctcagaaccttcttcgtgatgtttgcattcaactcacagtgttgaacctttctttgatagttcaggtttgaaacggtctttctgtagaaactgcaagtagatatttggacctctctgaggatttcgttggaaacgggataaaccgcacagaactaaaacagaagcattcacagaaaactcttggtgacgactgagtttaactcacagagctgaacattcctttggatggagcagtttcgaaacacactatttgtagaatgtgcaagtggatatttgggcctctctgaggatttcgttggaaacgggataaaccgcacagaactcaacagaagcattctcagaaactactttgtgatgattgcattcaagtcacagagttgaacattccctttgacagagcagtttggaaactctctttgtgtagaatctgcaagtggagatatggaccgctttgaggcctatggtagtaaaggaaatagcttcatataaaagctagacagtagcattctcagaaacttctttgtgatgcttgcattcaactcacagagttgaactttcctttcgagagagaagctttgaaacactctttttccagaatctgcaagtggacatttggagggctttgaggcctgtggtggaaaaggaattaacttcccgtaaaagctagatagaagcattgtcagaaacttctttgtgatgattgcattcaactcacagagatgaaggttcctttacaaacagcagtttccaaacactctttctgtggaatctgcaagtggatatttggacctctttgaagatttcgttgtaaacgggagaatcttcacagaaaagctaaacagaagcattctcagaaacttctctgtgatgtttgtgttcaactcccagagtttcacattgcttttcatagagtagttctgaaacatgcttttcgtagtgtctgcaagtggacatttggagcgctttcaggcctgtggtggaaaacgaattatggtcccataaaaactggagagaagccttctcagaaacttctctgtgatgattgcattcaactcacagatttgaaccctcctatggatagagcattgttgaaactctctttttgtggaatctgcaagtggatatgtggacctctccgaagatgtctttggaaacgggaatatcttcacataaaaactaaacagaagcattctcagaaacttcttggtgatgtttgcattcaaatcccagagttgaaccttcctgtgatagttcaggtttgaaacactctttttgtaggatctgcaagtggatatttggaccactctgtggccttcgttcgaaacgggtacatcttcacataaaatctagacagaagcattctcagaaaatactttgtgatgattgagtttaactcacagagctgaacattcctttggatggagcaggtttgagacacactttttgtagaatctacaagtggatatttggacctctctgaggatttcgttggaaacgcgataactgcacctaactaaacggaagcattctcagaaactgctttgtgatgattgcattcacctcacagagttgaacattcctattgatagagcagtttggaaacactcttgttgtggaatgtgcaagtggagatttggagcgctttgaggcctatggtagtaaagggaatagcttcatagaaaaactagacagatgcattctcaggaactttttggtgatgtttgtattcaactcccagagttgaactttcctttggaaagagcagctatgaaacactctttttctagaatctgcaagtggacgtttggagggctttgtggtttgtggtggaaaaggaaatatcttcacctaaatactagatagaagcattctcagaagcttctctgtgatgactgcattcaactcacggagttgaacactccttttgagagcgcagttttgaaactctctttctgtggcatctgcaaggggacatgtagacctctttgaagatttcgttggaaacggaatcatcttcacataaaaactatacagaagcagtctcagaatcttctttgtgatgtttgcattcaaatcccagagttgaactttcctttcaaagttcacgtttgaaacactctttttgcaggatctacaagtggatatttggaccactctgtgtccttcgttcgaaacgggtatatcttcacacgacatctagacagaagctttctcagaaaattctttgggatgattgagtggaactcacagagctgaacattccttgcgatgtagcagtttagaaacacactttctgcagaatctgcaagtgcatatttggacctctctgaggaattcgttggaaacgggataatttcagctgactaaacagaagcattctcagaaccttcttcgtgatgtctgcattcaactcacagtgtggaacctttctttgatagttcaggtttgaaacactctttttgtagaaactgcaaggggataattgcacttctttgaggcctaccgtagtaaaggaaataacttcctatagaaagaagacagaagcattctcagaaccctcttcgtgatgtttgcattcaactcacagtgctgaacctttctttgatagttcagctttgaaacactcttcttgtagaaactgcaagtggatatttggtcctctctgaggatttcgttggaaacgggataaaccgcacagaactaaacagaagaattctcagagccctcttcgtgatgtttgcattcaactcacagtgctgaacctttctttgatagtgcagctttgaaacactctttttgtagaaactgcaagtggatgtttggtcctctctgaggatttcgttggaaacgggataaaccgcacagaactaaaacagaagcattgtcagaaacttctttgtgatgattgcattcaactcacagagttgaaggttccttttcaaacagcagtttccaatcactctttctgtggaatctgcaagtggatatttgggcctctctgaggatttcgttggaaacgggataaaacgcacagaactaaaacagaagcattctcagaaacttctctgtgatgtttgtgttcaactcccagagtttcacgttgcttttcatagagtagttctgaaacatgcttttcgtagtgtctgcaagtggacgtttggagcgctttcaggcctgtggtggaaaacgaattatggtcacataaaaactggagagaagccttctcagaaacttctctgtggtgattgcattcaactcacagagttgaaccctcctatggatagagcagtgttgaaactctctttttgtggaatctgcaagtggatatgtggacctctccgaagatgtctttggaaacgggaatatcttcacataaaaactaaacagaagcattctcagaaacttcttggtgatgtttgcattcaaatcccagagttgaaccttcctttgatagttcaggtttgaaacactctttttgtaggatctgcaagtggctatttggaccactctgtggccttcgttcgaaacgggtatatcttcgcataaaatctagacagaagcattctcagaaaatactttgtgatgattgagtttaaatcacagagctgaccattcctttggatggagcaggtttgagacacactttttgtagaatctacaagtggatatttggacctctctgaggatttcgttggaaacgggataactgcacctaactaaacggaagcattctcagaaactgctttgtgatgattgcattcacctcacagagttgaacattcctattgatagagcagtttggaaacactcttgttgtggaatgtgcaagtggagatttggagcgctttgaggcctgtggtagtaaagggaatagcttcatagaaaaactagacagatgcattctcaggaacttctttttggtgatgtttgtattcaactcccagagttgaactttcctttggaaagagcagctatgaaacactctttttctagaatctgcaagtggacgtttggagggctttgtggtttgtggtggaaaaggaaatatcttcacctaaatactagatagaagcattctcagaagcttctctgtgatgactgcattcaactcacggagttgaacactccttttgagagcgcagttttgaaactctctttctgtggcatctgcaaggggacatgtagacctctttgaagatttcgttggaaacggaatcatcttcacataaaaactatacagaagcagtctcagaatcttctttgtgatgtttgcattcaaatcccagagttgaactttcctttcaaagttcacgtttgaaacactctttttgcaggatctacaagtggatatttggaccactctgtgtccttcgttcgaaacgggtataacttcacacgacatctagacagaagctttctcaggaaaattctttgggatgattgagtggaactcacagtgctgaacattccttgcgatgtagcagtttagaaacacactttctgcagaatctgcaagtgcatatttggacctctctgaggaattcgttggaaacgggataatttcagctgactaaacagaagcattctcagaaccttcttcgagatgtctgcattcaactcacagtgtggaacctttctttgatagttcaggtttgaaacactctttttgtggaaactgcaaggggataattgcacttctttgaggcctaccgtagtaatggaaataacttcctataaaaagaagacagaagcattctcagaaccctcttcgtgatgtttgcattcaactcacagtgctgaacctttatttgatagttcagctttgaaacactctttttgtagaaactgcaagtggatatttggtcctcctcctgaggatttcgttggaaacgggataaactgcacagaactaaacagaagcattcacagaaaacacttggtgacgactgagtttaactcacagagctgaacattcctttggatggagcagtttcgaaacacactatttctagaatctgcaagtggatatttgggcctctctgaggatttcgttggaaacgggataaaccgcacagaactaaaacagaagcattctcagaaactactttgtgatgattgcattcaagtcacagagttgaacattccctttgacagagcagtttggaaactctctttgtgtagaatctgcaagtggagatatggaccgctttgaggcctatggtagtaaaggaaacagcttcatataaaagctaggcagtagcattctcagaaacttctttgtgatgcttgcattcaactcacagagttaaactttcctttcgagagagaagctttgaaacactctttttcctgaatgtgcaagtggacatttggagggctttgaggcctgtggtggaaaaggaattatcttcccgtaaaagctagatagaagcattgtcagaaacttctttgtgatgattgcattcaactcacagagatgaaggttcctttacaaacagcagtttccaaacactctttctgtggaatctgcaagtggatatttggacctctttgaagatttcgttggaaacgggagaatcttcacagaaaagctaaacagaagcattctcagaaacttctctgtgatgtttgtgttcaactcccagagtttcacattgcttttcatagagtagttctgaaacatgcttttcgtagtgtctgcaagtggacatttggagcgctttcaggcctgtggtggaaaacgaattatggtcccataaaaactggagagaagacttctcagaaacttctctgtgatgattgcattcaactcacagatttgaaccctcctatggatagagcattgttgaaactctctttttgtggaatctgcaagtggatatgtggacctctccgaagatgtctttggaaacgggaatatcttcacataaaaactaaacagaagcattctcagaaacttcttggtgatgtttgcattcaaatcccagagttgaaccttcctgtgatagttcaggtttgaaacactctttttgtaggatctgcaagtggatatttggaccactctgtggccttcgttcgaaacgggtacatcttcacataaaatctagacagaagcattctcagaaaatactttgtgatgattgagtttaactcacagagctgaacattcctttggatggagcaggtttgagacacactttttgtagaatctacaagtggatatttggacctctctgaggatttcgttggaaacgcgataactgcacctaactaaacggaagcattctcagaaactgctttgtgatgattgcattcacctcacagagttgaacattcctattgatagagcagtttggaaacactcttgttgtggaatgtgcaagtggagatttggagcgctttgaggcctatggtagtaaagggaatagcttcatagaaaaactagacagatgcattctcaggaactttttggtgatgtttgtattcaactcccagagttgaactttcctttggaaagagcagctatgaaacactctttttctagaatctgcaagtggacgtttggagggctttgtggtttgtggtggaaaaggaaatatcttcacctaaatactagatagaagcattctcagaagcttctctgtgatgactgcattcaactcacggagttgaacactccttttgagagcgcagttttgaaactctctttctgtggcatctgcaaggggacatgtagacctctttgaagatttcgttggaaacggaatcatcttcacataaaaactatacagaagcagtctcagaatcttctttgtgatgtttgcattcaaatcccagagttgaactttcctttcaaagttcacgtttgaaacactctttttgcaggatctacaagtggatatttggaccactctgtgtccttcgttcgaaacgggtatatcttcacacgacatctagacagaagctttctcagaaaattctttgggatgattgagtggaactcacagagctgaacattccttgcgatgtagcagtttagaaacacactttctgcagaatctgcaagtgcatatttggacctctctgaggaattcgttggaaacgggataatttcagctgactaaacagaagcattctcagaaccttcttcgtgatgtctgcattcaactcacagtgtggaacctttctttgatagttcaggtttgaaacactctttttgtagaaactgcaaggggataattgcacttctttgaggcctaccgtagtaaaggaaataacttcctatagaaagaagacagaagcattctcagaaccctcttcgtgatgtttgcattcaactcacagtgctgaacctttctttgatagttcagctttgaaacactcttcttgtagaaactgcaagtggatatttggtcctctctgaggatttcgttggaaacgggataaaccgcacagaactaaacagaagaattctcagagccctcttcgtgatgtttgcattcaactcacagtgctgaacctttctttgatagtgcagctttgaaacactctttttgtagaaactgcaagtggatatttggtcctctctgaggatttcgttggaaacgggataaaccgcacagaactaaaacagaagcattgtcagaaacttctttgtgatgattgcattcaactcacagagttgaaggttccttttcaaacagcagtttccaatcactctttctgtggaatctgcaagtggatatttgggcctctctgaggatttcgttggaaacgggataaaacgcacagaactaaaacagaagcattctcagaaacttctctgtgatgtttgtgttcaactcccagagtttcacattgcttttcatagagtagttctgaaacatgcttttcgtagtgtctgcaagtggacatttggagcgctttcaggcctgtggtggaaaacgaattatggtcacataaaaactggagagaagccttctcagaaacttctctgtgatgattgcattcaactcacagagttgaaccctcctatggatagagaagtgttgaaactctctttttgtggaatctgcaagcggatatgtggacctctccgaagatgtctttggaaacgggaatatcttcacataaaaactaaacagaagcattctcagaaacttcttgatgatgtttgcattcaaatcccagagttgaaccttcctttgagagttcaggtttgaaacactctttttgtaggatctgcaagtggatatttggaccactctgtggtcttcgttcgaaacgggtacatcttcgcataaaatctagacagaagcattctcagaaaatactttgtgatgattgagttgaactcacagagctgaacattcctttggatggagcaggtttgagacacactttttgtagaatctacaagtggatatttggacctctctgaggatttcgttggaaacgggataactgcacctaactaaacggaagcattctcagaaactgctttgtgatgattgcattcacctcacagagttgaacattcctattgatagagcagtttggaaacactcttgttgtggaatgtgcaagtggagatttggagcgctttgaggcctatggtagtaaagggaatagcttcatagaaaaactagacagatgcattctcaggaactttttggtgatgtttgtattcaactcccagagttgaactttcctttggaaagagcagctatgaaacactctttttctagaatctgcaagtggacgtttggagggctttgtggtttgtggtggaaaaggaaatgtcttcacctaaatactagatagaagcattctcagaagcttctctgtgatgactgcattcaactcacggagttgaacactccttttgagagcgcagttttgaaactctctttctgtggcatctgcaaggggacatgtagacctctttgaagatttcgttggaaacggaatcatcttcacataaaaactatacagaagcagtctcagaatcttctttgtgatgtttgcattcaaatcccagagttgaactttcctttcaaagttcacgtttgaaacactctttttgcaggatctacaagtggatatttggaccactctgtgtccttcgttcgaaacgggtatatcttcacatgacatctagacagaagctttctcagaaaattgtttgggatgattgacttgaactcacagagctgagcattccttgcgatgtagcagtttagaaacacactttctgcagaatctgcaagtgcatatttggacctctctgaggaattcgttggaaacgggataatttcagctgactaaacagaagcattctcagaaccttcttcgtgatgtctgcattcaactcacagtgtggaacctttccttgatagttcaggtttgaaacactctttttgtagaaactgcaaggggataattgcactctttgaggagtaccgtagtaaaggaaataacttcctctaaaaagaagacagaagcattctcagaaccctcttcgtgatgtttgcattcaactcacagtgctgaacctttctttgatagttcagctttgaaacactctttttgtagaaactgcaaatggatatttggtcctctctgaggatttcgttggaaaagggataaaacgcacagaactaaacagaagcattcacagaaaactcttggtgacgactgagtttaactcacagagctgaacattcctttggatggagcagtttcgaaacacactatttgtagaatctgcaagtggatatttgggcctctctgaggatttcgttggaaacgggataaaccgcacagaactaaaacagaagcattctcagaaactactttgtgatgattgcattcaagtcacagagttgaacattccctttgacagagcagtttggaaactctctttgtgtagaatctgcaagtggagatatggaccgctttgaggcctatggtagtaaaggaaatagcttcatataaaagctagacagtagcattctcagaaacttctttgtgatgcttgcattcaactcacagagttgaactttcctttcgagagagaagctttgaaacactctttttccagaatgtgcaagtggacatttggggagctttgaggcctggggtggaaaaggaattatcttcccgtaaaagctagatagaagcattgtcagaaacttctttgtgatgactgcattcaactcacagagttgaaggttccttttcaaacagcagtttccaatcactctttctgtggaatctgcaagtggatatttcgacctctttgaagatttcgttggaaacgggagaatcttcccagaaaagctaaacagaagcattctcagaaacttctctgtgatgtttgtgttcaactcccagagtttcacgttgcttttcatagagtagttctgaaacatgcttttcgtagtgtctgcaagtggacatttggagcgctttcaggcctgtggtggaaaacgaattatggtcacataaaaactggagagaagccttctcagaaacttctctgtgatgattgcattcaactcacagagttgaaccctcctatggatagagcagtgttgaaactctctttttgtggaatctgcaagtggatatgtggacctctccgaagatgtctttggaaacgggaatatcttcacataaaaactaaacagaagcattctcagaaacttcttggtgatgtttgcattcaaatcccagagttgagccttcctttgatagttcaggtttgaaacactctttctgtaggatctgcaagtggctatttggaccactctgtggccttcgttcgaaacgggtatatcttcgcataaaatctagacagaagcattctcagaaaatactttgtgatgattgagtttaaatcacagagctgaccattcctttggatggagcaggtttgagacacactttttgtagaatctacaagtggatatttggacctctctgaggatttcgttggaaacgggataactgcacctaactaaacggaagcattctcagaaactgctttgtgatgattgcattcacctcacagagttgaacattcctattgatagagcagtttggaaacactcttgttgtggaatgtgcaagtggagatttggagcgctttgaggcctatggtagtaaagggaatagcttcatagaaaaactagacagatgcattctcaggaactttttggtgatgtttgtattcaactcccagagttgaactttcctttggaaagagcagctatgaaacactctttttctagaatctgcaagtggacgtttggagggctttgtggtttgtggtggaaaaggaaatatcttcacctaaatactagatagaagcatcctcagaagcttctctgtgatgactgcattcaactcacggagttgaacactccttttgagagcgcagttttgaaactctctttctgtggcatctgcaaggggacatgtagacctctttgaagatttcgttggaaacggaatcatcttcacataaaaactatacagaagcagtctcagaatcttctttgtgatgtttgcattcaaatcccagagttgaacttgcctttcaaagttcacgtttgaaacactctttttgcaggatctacaagtggatatttggaccactctgtgtccttcgttcgaaacgggtatatcttcacatgacatctagacagaagctttctcagaaaattctttgggatgattgagtggaactcacagaggtgaacattccttgcgatgtagcagtttagaaacacactttctgcagaatctgcaagtgcatatttggacctctctgaggaattcgttggaaacgggataatttcagctgactaaacagaagcattctcagaaccttcttcgtgatgtctgcattcaactcacagtgtggaacctttctttgatagttcaggtttgaaacactctttttgtagaaactgcaaggggataattgcacttctttgaggcctaccgtagtaaaggaaataacttcctatagaaagaagacagaagcattctcagaaccctcttcgtgatgtttgcattcaactcacagtgctgaacctttctttgatagttcagctttgaaacactcttcttgtagaaactgcaagtggatatttggtcctctctgaggatttcgttggaaacgggataaaccgcacagaactaaacagaagaattctcagagccctcttcgtgatgtttgcattcaactcacagtgctgaacctttctttgatagtgcagctttgaaacactctttttgtagaaactgcaagtggatgtttggtcctctctgaggatttcgttggaaacgggataaaccgcacagaactaaaacagaagcattgtcagaaacttctttgtgatgattgcattcaactcacagagttgaaggttccttttcaaacagcagtttccaatcactctttctgtggaatctgcaagtggatatttgggcctctctgaggatttcgttggaaacgggataaaacgcacagaactaaaacagaagcattctcagaaacttctctgtgatgtttgtgttcaactcccagagtttcacgttgcttttcatagagtagttctgaaacatgcttttcgtagtgtctgcaagtggacatttggagcgctttcaggcctgtggtggaaaacgaattatggtcacataaaaactggagagaagccttctcagaaacttctctgtgatgattgcattcaactcacagagttgaaccctcctatggatagagcagtgttgaaactctctttttgtggaatctgcaagtggatatgtggacctctccgaagatgtctttggaaacgggaatatcttcacataaaaactaaacagaagcattctcagaaacttcttggtgatgtttgcattcaaatcccagagttgaaccttcctttgatagttcaggtttgaaacactctttctgtaggatctgcaagtggctatttggaccactctgtggccttcgttcgaaacgggtatatcttcgcataaaatctagacagaagcattctcagaaaatactttgtgatgattgagtttaaatcacagagctgaccattcctttggatggagcaggtttgagacacactttttgtagaatctacaagtggatatttggacctctctgaggatttcgttggaaacgggataactgcacctaactaaacggaagcattctcagaaactgctttgtgatgattgcattcacctcacagagttgaacattcctattgatagagcagtttggaaacactcttgttgtggaatgtgcaagtggagatttggagcgctttgaggcctgtggtagtaaagggaatagcttcatagaaaaactagacagatgcattctcaggaactttttggtgatgtttgtattcaactcccagagttgaactttcctttggaaagagcagctatgaaacactctttttctagaatctgcaagtggacgtttggagggctttgtggtttgtggtggaaaaggaaatatcttcacctaaatactagacagaagcattctcagaagcttctctgtgatgactgcattcaactcacggagttgaacactccttttgagagcgcagttttgaaactctctttctgtggcatctgcaaggggacatgtagacctctttgaagatttcgttggaaacggaatcatcttcacataaaaactatacagaagcagtctcagaatcttctttgtgatgtttgcattcaaatcccagagttgaactttcctttcaaagttcacgtttgaaacactctttttgcaggatctacaagtggatatttggaccactctgtgtccttcgttcgaaacgggtatatcttcacacgacatctagacagaagctttctcagaaaattctttgggatgattgagtggaactcacagagctgaacattccttgcgatgtagcagtttagaaacacactttctgcagaatctgcaagtgcatatttggacctctctgaggaattcgttggaaacgggataatttcagctgactaaacagaagcattctcagaaccttcttcgtgatgtctgcattcaactcacagtgtggaacctttctttgatagttcaggtttgaaacactctttttgtagaaactgcaaggggataattgcacttctttgaggcctaccgtagtaaaggaaataacttcctatagaaagaagacagaagcattctcagaaccctcttcgtgatgtttgcattcaactcacagtgctgaacctttctttgatagttcagctttgaaacactcttcttgtagaaactgcaagtggatatttggtcctctctgaggatttcgttggaaacgggataaaccgcacagaactaaacagaagaattctcagagccctcttcgtgatgtttgcattcaactcacagtgctgaacctttctttgatagtgcagctttgaaacactctttttgtagaaactgcaagtggatgtttggtcctctctgaggatttcgttggaaacgggataaaccgcacagaactaaaacagaagcattgtcagaaacttctttgtgatgattgcattcaactcacagagttgaaggttccttttcaaacagcagtttccaatcactctttctgtggaatctgcaagtggatatttgggcctctctgaggatttcgttggaaacgggataaaacgcacagaactaaaacagaagcattctcagaaacttctctgtgatgtttgtgttcaactcccagagtttcacgttgcttttcatagagtagttctgaaacatgcttttcgtagtgtctgcaagtggacatttggagcgctttcaggcctgtggtggaaaacgaattatggtcacataaaaactggagagaaagccttctcagaaacttctctgtgatgattgcattcaactcacagagttgaaccctcctatggatagagcagtgttgaaactctctttttgtggaatctgcaagtggatatgtggacctctccgaagatgtctttggaaacgggaatatcttcacataaaaactaaacagagcattctcagaaacttcttggtgatgtttgcattcaaatcccagagttgaaccttcctttgatagttcaggtttgaaacactctttttgtaggatctgcaagtggatatttggaccactctgtggcctttgttcgaaacgggtacatcttcgcataaaatctagacagaagcattctcagaaaatactttgtgatgattgagtttaaatcacagagctgaccattcctttggatggagcaggtttgagacacactttttgtagaatctacaagtggatatttggacctctctgaggatttcgttggaaacgggataactgcacctaactaaacggaagcattctcagaaactgctttgtgatgattgcattcacctcacagagttgaacattcctattgatagagcagtttggaaacactcttgttgtggaatgtgcaagtggagatttggagcgctttgaggcctgtggtagtaaagggaatagcttcatagaaaaactagacagatgcattctcaggaaccttttggtgatgtttgtattcaactcccagagttgaactttcctttggaaagagcagctatgaaacactctttttctagaatctgcaagtggacgtttggagggctttgtggtttgtggtggaaaaggaaatatcttcacctaaatactagatagaagcattctcagaagcttctctgtgatgactgcattcaactcacggagttgaacactccttttgagagcgcagttttgaaactctctttctgtggcatctgcaaggggacatgtagacctctttgaagatttcgttggaaacggaatcatcttcacataaaaactatacagaagcagtctcagaatcttctttgtgatgtttgcattcaaatcccagagttgaactttcctttcaaagttcacgtttgaaacactctttttgcaggatctacaagtggatatttggaccactctgtgtccttcgttcgaaacgggtatatcttcacacgacatctagacagaagctttctcagaaaattctttgggatgattgagtggaactcacagagctgaacattccttgcgatgtagcagtttagaaacacactttctgcagaatctgcaagtgcatatttggacctctctgaggaattcgttggaaacgggataatttcagctgactaaacagaagcattctcagaaccttcttcgtgatgtctgcattcaactcacagtgtggaacctttctttgatagttcaggtttgaaacactctttttgtagaaactgcaaggggataattgcacttctttgaggcctaccgtagtaaaggaaataacttcctatagaaagaagacagaagcattctcagaaccctcttcgtgatgtttgcattcaactcacagtgctgaacctttctttgatagttcagctttgaaacactcttcttgtagaaactgcaagtggatatttggtcctctctgaggatttcgttggaaacgggataaaccgcacagaactaaacagaagaattctcagagccctcttcgtgatgtttgcattcaactcacagtgctgaacctttctttgatagtgcagctttgaaacactctttttgtagaaactgcaagtggatgtttggtcctctctgaggatttcgttggaaacgggataaaccgcacagaactaaaacagaagcattgtcagaaacttctttgtgatgattgcattcaactcacagagttgaaggttccttttcaaacagcagtttccaatcactctttctgtggaatctgcaagtggatatttgggcctctctgaggatttcgttggaaacgggataaaacgcacagaactaaaacagaagcattctcagaaacttctctgtgatgtttgtgttcaactcccagagtttcacgttgcttttcatagagtagttctgaaacatgcttttcgtagtgtctgcaagtggacatttggagcgctttcaggcctgtggtggaaaacgaattatggtcacataaaaactggagagaagccttctcagaaacttctctgtgatgattgcattcaactcacagagttgaaccctcctatggatagagcagtgttgaaactctctttttgtggaatctgcaagtggatatgtggacctctccgaagatgtctttggaaacgggaatatcttcacataaaaactaaacagaagcattctcagaaacttcttggtgatgtttgcattcaaatcccagagttgaaccttcctttgatagttcaggtttgaaacactctttctgtaggatctgcaagtggctatttggaccactctgtggccttcgttcgaaacgggtatatcttcgcataaaatctagacagaagcattctcagaaaatactttgtgatgattgagtttaaatcacagagctgaccattcctttggatggagcaggtttgagacacactttttgtagaatctacaagtggatatttggacctctctgaggatttcgttggaaacgggataactgcacctaactaaacggaagcattctcagaaactgctttgtgatgattgcattcacctcacagagttgaacattcctattgatagagcagtttggaaacactcttgttgtggaatgtgcaagtggagatttggagcgctttgaggcctgtggtagtaaagggaatagcttcatagaaaaactagacagatgcattctcaggaactttttggtgatgtttgtattcaactcccagagttgaactttcctttggaaagagcagctatgaaacactctttttctagaatctgcaagtggacgtttggagggctttgtggtttgtggtggaaaaggaaatatcttcacctaaatactagatagaagcattctcagaagcttctctgtgatgactgcattcaactcacggagttgaacactccttttgagagcgcagttttgaaactctctttctgtggcatctgcaaggggacatgtagacctctttgaagatttcgttggaaacggaatcatcttcacataaaaactatacagaagcagtctcagaatcttctttgtgatgtttgcattcaaatcccaggagttgaactttcctttcaaagttcacgtttgaaacactctttttgcaggatctacaagtggatatttggaccactctgtgtccttcgttcgaaacgggtataacttcacacgacatctagacagaagctttctcagaaaattctttgggatgattgagtggaactcacagagctgaacattccttgcgatggagcagtttagaaacacactttctgcagaatctgcaagtgcatatttggacctctctgaggaattcgttggaaacgggataatttcagctgactaaacagaagcattctcagaaccttcttcgtgatgtctgcattcaactcacagtgtggaacctttctttgatagttcaggtttgaaacactctttttgtagaaactgcaaggggataattgcacttctttgaggcctaccgtagtaaaggaaataacttcctatagaaagaagacagaagcattctcagaaccctcttcgtgatgtttgcattcaactcacagtgctgaacctttctttgatagttcagctttgaaacactcttcttgtagaaactgcaagtggatatttggtcctctctgaggatttcgttggaaacgggataaaccgcacagaactaaacagaagaattctcagagccctcttcgtgatgtttgcattcaactcacagtgctgaacctttctttgatagtgcagctttgaaacactctttttgtagaaactgcaagtggatgtttggtcctctctgaggatttcgttggaaacgggataaaccgcacagaactaaaacagaagcattgtcagaaacttctttgtgatgattgcattcaactcacagagttgaaggttccttttcaaacagcagtttccaatcactctttctgtggaatctgcaagtggatatttgggcctctctgaggatttcgttggaaacgggataaaacgcacagaactaaaacagaagcattctcagaaacctctctgtgatgtttgtgttcaactcccagagtttcacgttgcttttcatagagtagttctgaaacatgcttttcgtagtgtctgcaagtggacatttggagcgctttcaggcctgtggtgtaaaacgaattatggtcacataaaaactggagagagccttctcagaaacttctctgtgatgattgcattcaactcacagagttgaaccctcctatggatagagcagtgttgaaactctctttttgtggaatctgcaagtggatatgtggacctctccgaagatgtctttggaaacgggaatatcttcacataaaaactaaacagaagcattctcagaaacttcttggtgatgtttgcattccaatcccagagttgaaccttcctttgatagttcaggtttgaaacactctttttgtaggatctgcaagtggatatttggaccactctgtggccttcgttcgaaacgggtacatcttcgcataaaatgctagacagaagcattctcagaaaatactttgtgatgattgagttgaactcacagagctgaacattcctttggatggagcaggtttgagaaacactttttctagaatctacaagtggatatttggacctctctgaggatttcgttggaaacgggataactgcacctaactaaacggaagcattctcagaaactgctttgtgatgattgcattcacctcacagagttgaacattcctattgatagagcagtttggaaacactcttgttgtggaatgtgcaagtggagatttggagcgcattgaggcctatggtagtaaagggaatagcttcatagaaaaactagacagatgcattctcaggaactttttggtgatgtttgtattcaactcccagagttgaactttcctttggaaagagcagctatgaaacactctttttctagaatctgcaagtggacgtttggagggctttgtggtttgtggtggaaaaggaaatatcttcacctaaatactagatagaagcattctcagaagcttctctgtgatgactgcattcaactcacggagttgaacactccttttgagagcgcagttttgaaactctctttctgtggcatctgcaaggggacatgtagacctctttgaagatttcgttggaaacggaatcatcttcacataaaaactatacagaagcagtctcagaatcttctttgtgatgtttgcattcaaatcccagagttgaactttcctttcaaagttcacgtttgaaacactctttttgcaggatctacaagtggatatttggaccactctgtgtccttcgttcgaaacgggtatatcttcacacgacatctagacagaagctttctcagaaaattctttgggatgattgagtggaactcacagagctgaacattccttgcgatgtagcagtttagaaacacactttctgcagaatctgcaagtgcatatttggacctctctgaggaattcgttggaaacgggataatttcagctgactaaacagaagcattctcagaaccttcttcgtgatgtctgcattcaactcacagtgtggaacctttctttgatagttcaggtttgaaacactctttttgtagaaactgcaaggggataattgcacttctttgaggcctaccgtagtaaaggaaataacttcctatagaaagaagacagaagcattctcagaaccctcttcgtgatgtttgcattcaactcacagtgctgaacctttctttgatagttcagctttgaaacactcttcttgtagaaactgcaagtggatatttggtcctctctgaggatttcattggaaacgggataaaccgcacagaactaaacagaagcattctcagaacattcttcgtgatgtttgcattcaactcacagtgttgaacctttctgtgatagttcaggttggaaacggtctttctgtagaaactgcaagtagatatttggacctctctgaggatttcgttggaaacgggataaaccgcacagaactaaaacagaagcattcacagaaaactcttggtgttgactgagtttaactcacagagctgaacattcctttggatggagcagtttcgaaacacactatttgtagaatgtgcaactggatatttgggcctccctgaggatttcgttggaaacgggataaaccacacagaactaaacagaagcattctcagaaactactttgtgatgattgcattcaagtcacagagttgaacattccctttgacagagcagtttggaaactctctttgtgtagaatctgcaagtggagatatagaccgctttgaggcctatggtagtaaaggaaatagcttcatataaaagctagacagtagcattctcagaaacttctttgtgatgcttgcattcaactcacagagttgaactttcctttcgagagagaagctttgaaacactctttttccagaatctgcaagtggacatttggagggctttgaggcctgtggtggaaaaggaattatcttcccgtaaaagctagatagaagcattgtcagaaacttctttgtgatgattgcattcaactcacagagttgaaggttccttttcaaagagcagtttccaatcactctttctgtggaatctgcaagtggatatttcgacctattttgaagatttcgttggaaacgggataatcttcacagaaaagctaaacagaagcattctcagaaacttctctgtgatgtttgtgttcaactcccagactttcacattgcttttcatagagtagttctgaaacatgcttttcgtagtgtctacaagtggacatttggagcgcttccagtcctgtggtggaaaacgaattatggtcacataaaaactggagagaagctttctcagaaacttctctgtgatgattgcattcaactcacagagttgaaccctcctatggatagagcagtgttgaaactctctttttgtggaatctgcaggtggatatgtggacctctccgaagatgtctttggaaacgggaatatcttcacataataactaaacagaagcattctcagaaaattcttggtgatgtttgcattcaaatcccagagttgaaccttcctttgatagttcaggtttgaaacactctttttgtaggatctgcaagtggatatttggaccactctgtggccttcgttccaaacgggtacatcttcgcataaaatctagacagaagcattctcagaaaatactttgtgatgattgagttgaactcacagagctgaacattcctttggatggagcaggtttgagacacactttttgtagaatctacaagtggatatttggacctctctgaggatttcgttggaaacgggataactgcacataactaaacggaagcattctcagaaactgcttcgtgatgattgcattcacctcacagagttgaacattcctattgatagagcagtttggaaacactcttgttgtggaatgtgcaagtggagatttggagcgctttgaggcctatggtagtaaagggaatagcttcatagaaaaactagacagatgcattctcaggaactttttggtgatgtttgtattcaactcccagagttgaactttcctttggaaagagcagctatgaaacactctttttctagaatctgcaagtggacgtttggagggctttgtggtttgtggtggaaaaggaaatatcttcacctaaatactagatagaagcattctcagaagcttctctgtgatgagtgcattcaactcacggagttgaacactccttttgagagcgcagttttgaaactctctttctgtggcatctgcaaggggacatgtagacctctttgaagatttcgttggaaacggaatcatcttcacataaaaactatacagaagcagtctcagaatcttctttgtgatgtttgcattcaaatcccagagttgaactttcctttcaaagttcacatttgaaacactctttttgcaggatctacaagtggatatttggaccactctgtgtccttcgttcgaaacgggtatatcttcacatgacatctagacagaagctttctcagaaaattctttgggatgattgagttgaactcacagagctgaacattccttgcgatgtagcagtttagaaacacactttctgcagaatctgcaagtgcatatttggacctctctgaggaattcgttggaaacgggataatttcagctgactaaacagaagcattctcagaaccttcttcgtgatgtctgcattcaactcacagtgtggaaactttctttgatagttcaggtttgaaacactctttttgtagaaactgcaaggggataattgcacttctttgaggcctaccgtagtaaaggaaataacttcctataaaaagaagacagaagcattctcagaaccctcttcgtgatgtttgcattcaactcacagtgctgaacctttctttgatagttcagctttgaaacactcttcttgtagaaactgcaagtggatatttggtcctctctgaggatttcgttggaaacgggataaaccgcacagaactaaacagaagaattctcagagccctcttcgtgatgtttgcattcaactcacagtgctgaacctttctttgatagtgcagctttgaaacactctttttgtagaaactgcaagtggatgtttggtcctctctgaggatttcgttggaaacgggataaaccgcacagaactaaaacagaagcattgtcagaaacttctttgtgatgattgcattcaactcacagagttgaaggttccttttcaaacagcagtttgcaatcactctttctgtggaatctgcaagtggatatttgggcctctctgaggatttcgttggaaacgggataaaacgcacagaactaaaacagaagcattctcagaaacttctctgtgatgtttgtgttcaactcccagagtttcacgttgcttttcatagagtagttctgaaacatgcttttcgtagtgtctgcaagtggacatttggagcgctttcaggcctgtggtggaaaacgaattatggtcacataaaaactggagagaagccttctcagaaacttctctgtgatgattgcattcaactcacagagttgaaccctcctatggatagagcagtgttgaaactctctttttgtggaatctgcaagtggatatgtggacctctccgaagatgtctttggaaacgggaatatcttcacataaaaactaaacagaagcattctcagaaacttcttggtgatgtttgcattcaaatcccagagttgaaccttcctttgatagttcaggtttgaaacactctttctgtaggatctgcaagtggctatttggaccactctgtggccttcgttcgaaacgggtatatcttcgcataaaatctagacagaagcattctcagaaaatactttgtgatgattgagtttaaatcacagagctgaccattcctttggatggagcaggtttgagacacactttttgtagaatctacaagtggatatttggacctctctgaggatttcgttggaaacggggtaactgcacctaactaaacggaagcattctcagaaactgctttgtgatgattgcattcacctcacagagttgaacattcctattgatagagcagtttggaaacactcttgttgtggaatgtgcaagtggagatttggagcgctttgaggcctatggtagtaaagggaatagcttcatagaaaaactagacagatgcattctcaggaaccttttggtgatgtttgtattcaactcccagagttgaactttcctttggaaagagcagctatgaaacactctttttctagaatctgcaagtggacgtttggagggctttgtggtttgtggtggaaaaggaaatatcttcacctaaatactagatagaagcattctcagaagcttctctgtgatgactgcattcaactcacggagttgaacactccttttgagagcgcagttttgaaactctctttctgtggcatctgcaaggggacatgtagacctctttgaagatttcgttggaaacggaatcatcttcacataaaaactatacagaagcagtctcagaaatcttctttgtgatgtttgcattcaaatcccagagttgaactttcctttcaaagttcacgtttgaaacactctttttgcaggatctacaagtggatatttggaccactctgtgtccttcgttcgaaacgggtatatcttcacacgacatctagacagaagctttctcagaaaattctttgggatgattgagtggaactcacagagctgaacattccttgcgatgtagcagtttagaaacacactttctgcagaatctgcaagtgcatatttggacctctctgaggaattcgttggaaacgggataatttcagctgactaaacagaagcattctcagaacctccttcgtgatgtctgcattcaactcacagtgtggaacctttctttgatagttcaggtttgaaacactctttttgtagaaactgcaaggggataattgcacttctttgaggcctaccgtaataaaggaaataacttcctatagaaagaagacagaagcattctcagaaccctcttcgtgatgtttgcattcaactcacagtgctgaacctttctttgatagttcagctttgaaacactcttcttgtagaaactgcaagtggatatttggtcctctctgaggatttcgttggaaacgggataaaccgcacagaactaaacagaagaattctcagagcccttttcgtgatgtttgcattcaactcacagtgctgaacctttctttgatagtgcagctttgaaacactctttttgtagaaactgcaagtggatatttggtcctctctgaggatttcgttggaaacgggataaaccgcacagaactaaaacagaagcattcacagaaaactcttggtgacgactgagtttaactcacagagctgaatattcctttggatggagcagtttcgaaacacactatttgtagaatgtgcaagtggatacgtgggcctctctgaggatttcgttggaaacgggataaaccgcacagaactaaacagaagcattctcagaaactactttgtgatgattgcattcaagtcacagagttgaacattccctttgacagagcagtttggaaactctctttgtgtagaatctgcaagtggagatatggaccgctttgaggcctatggtagtaaaggaaatagcttcatataaaagctagtcagtagcattctcagaaacttctttgtgatgcttgcattcaactcacagagttgaactttcctttcgagagagaagctttgaaacactctttttccagaatctgcaagtggacatttggagggctttgaggcctgtggtggaaaaggaattatcttcccgtaaaagctagatagaagcattgtcagaaacttctttgtgatgattgcattcaactcacagagatgaaggttcctttacaaacagcagtttccaaacactctttctgtggaatctgcaagtggatatttggacctctttgaagatttcgttggaaacgggagaatcttcacagaaaagctaaacagaagcattctcagaaacttctctgtgatgtttgtgttcaactcccagagtttcacattgcttttcatagagtagttctgaaacatgcttttcgtagtgtctgcaagtggacatttggagcgctttcaggcctgtggtggaaaacgaattatggtcccataaaaactggagagaagacttctcagaaacttctctgtgatgattgcattcaactcacagatttgaaccctcctatggatagagcattgttgaaactctctttttgtggaatctgcaagtggatatgtggagctctccgaagatgtctttggaaacgggaatatcttcacataaaaactaaacagaagcattctcagaaacttcttggtgatgtttgcattcaaatcccagagttgaaccttcctgtgatagttcaggtttgaaacactctttttgtaggatctgcaagtggatatttggaccactactgtggccttcgttcgaaacgggtacatcttcacataaaatctagacagaagcattctcagaaaatactttgtgatgattgagtttaactcacagagctgaacattcctttggatggagcaggtttgagacacactttttgtagaatctacaagtggatatttggacctctctgaggatttcgttggaaacgcgataactgcacctaactaaacggaagcattctcagaaactgctttgtgatgattgcattcacctcacagagttgaacattcctattgatagagcagtttggaaacactcttgttgtggaatgtgcaagtggagatttggagcgctttgaggcctatggtagtaaagggaatagcttcatagaaaaactagacagatgcattctcaggaactttttggtgatgtttgtattcaactcccagagttgaactttcctttggaaagagcagctatgaaacactctttttctagaatctgcaagtggacgtttggagggctttgtggtttgtggtggaaaaggaaatatcttcacctaaatactagatagaagcatcctcagaagcttctctgtgatgactgcattcaactcacggagttgaacactccttttgagagcgcagttttgaaactctctttctgtggcatctgcaaggggacatgtagacctctttgaagatttcgttggaaacagaatcatcttcacataaaaactatacagaagcagtctcagaatcttctttgtgatgtttgcattcaaatccccgagttgaactttcctttcaaagttcacgtttgaaacactctttttgcaggatctacaagtggatatttggaccactctgtgtccttcgttcgaaacgggtatatcttcacatgacatctagacagaagctttctcagaaaattctttgggatgattgagttgaactcacagagctgagcattccttgcgatgtagcagtttagaaacacactttctgcagaatctgcaagtgcatatttggacctctgtgaggaattcgttggaaacgggataatttcagctgactaaacagaagcattctcagaaccttcttcgtgatgtctgcattcaactcacagtgtggaacctttctttgatagttcaggtttgaaacactctttctgtagaaactgcaaggggataattgcactctttgaggagtaccgtagtaaaggaaataacttcctataaaaagaagacagaagcattctcagaaccctcttcgtgatgtttgcattcaactcacagtgctgaacctttctttgatagttcagctttgaaacactctttttgtagaaactgcaagtggatatttggtcctctctgagcatttcgttggaaacgggataaactgcacagaactaaacagaagcattctcagaaccttcttcgtgatgtttgcattcaactcacagtgttgaacctttctttgatagttcaggtttcaaacggtctttctgtagaaactgcaagtagatatttggacctctctgaggatttcgttggaaacgggataacccgcacagaactaaaacagaagcattcacagaaaactcttggtgacgactgagtttaactcacagagctgaacattcctttggatggagcagtttcgaaacacactatttgtagaatgtgcaagtggatatttaggcctctctgaggatttcgtcggaaacgggataaaccgcacagaactaaacagaagcattctcagaaactactttgtgatgattgcattcaagtcacagagctgaacattccctttgacagagcagtttggaaactctctttgtgtagaatctgcaagtggagatatggaatgctttgaggactatggtagtaaaggaaataccttcatataaaagctagacagtagcattctcagaaacttctttgtgatgcttgcattcaactcacagagttgaactttcctttcgagagagaagctttgaaacactctttttccagaatctgcaagtggacatttggagggctttgaggcctgtggtggaaaaggaattatcttcccgtaaaagctagatagaagcattgtcagaaacttctttgtgatgattgcattcaactcacagagttgaaggttccttttcaaagagcagtttccaatcactctttctgtggaatctgcaagtggatatttcgacctctttgaagatttcgttggaaacgggagaatcttcacagaaaagctaaagagaagcattctcagaaacttctctgtgatgtttgtgttcaactcccagagtttcacattgcttttcatagagtagttctgaaacatgcttttcgtagtgtctgcaagtggacatttggagcgctttcaggcctgtggtggaaaacgaattatggtcacataaaaactggagagaagccttctcagaaacttctctgtgatgattgcattcaactcacagagttgaaccctccctatggatagagcagtgttgaaactctctttttgtggaatctgcaagtggatatgtggacctctccgaagatgtctttggaaacgggaatatcttcacataaaaactaaacagaagcattctcagaaatttcttggtgatgtttgcatacaaatcccagagttgaaccttcctttgatagttcaggtttgaaacactctttttgtaggatctgcaagtggctatttggactactctgaggccttcgttcgaaacgggtatatcttcgcataaaatctagacagaagcattctcagaaaatactttgtgatgattgagttgaactcacagagctgaacattcctttggatggagcaggtttgagacacactttttgtagaatctacaagtggatatttggacctctctgaggatttcgttggaaacgggataactgcacctaactaaacggaagcattctcagaaactgctttgtgatgattgcattcacctcacagagttgaacatttctattgatagagcagtttggaaacactcttgttgtggaatgtgcaagtggagatttggagcgctttgaggcctatggtagtaaagggaatagcttcatagaaaaactagacagatgcattctcaggaactttttggtgatgtttgtattcaactcccagagttgaactttcctttggaaagagcagctatgaaacactctttttctagaatctgcaagtggacgtttggagggctttgtggtttgtggtggaaaaggaaatatcttcacctaaatactagatagaagcattctcagaagcttctctgtgatgactgcattcaactcacggagttgaacactccttttgagagcgcagttttgaaactctctttctgtggcatctgcaaggggacatgtagacctctttgaagatttcgttggaaacggaatcatcttcacataaaaactatacagaagcagtctcagaatcttctttgtgatgtttgcattcaaatcccagagttgaactttcctttcaaagttcacgtttgaaacactctttttgcaggatctacaagtggatatttggaccactctgtgtccttcgttcgaaacgggtatatcttcacacgacatctagacagaagctttctcagaaaattctttgggatgattgagtggaactcacagagctgaacattccttgcgatgtagcagtttagaaacacactttctgcagaatctgcaagtgcatatttggacctctctgaggaattcgttggatacgggataatttcagctgactaaacagaagcattctcagaacttcttcgtgatgtctgcattcaactcacagtgtggaacctttctttgatagttcaggtttgaaacactctttttgtagaaactgcaaggggataattgcacttctttgaggcctaccgtagtaaaggaaataacttcctatagaaagaagacagaagaattctcagagccctcttcgtgatgtttgcattcaactcacagtgctgaacctttctttgatagtgcagctttgaaacactctttttgtagaaactgcaagtggatgtttggtcctctgctgaggatttcgttggaaacgggataaaccgcacagaactaaaacagaagcattctcagaaccttcttcgtgatgtttgcattcaactcacagtgttgaacctttctttgatagttcaggtttgaaacggtctttctgtagaaactgctagtagatatttggacctctctgaggatttcgttggaaacgggataaagcgcacacaactaaaacagatagcattcacagtaaaactcttggtgacgactgagtttaactcacagagctgaacattcctttggatggagcagtttcgaaacacactatttgtagaatgtgcaagtggatatttgggcctctctgaggatttcgttggaaacgggataaaccgcacagaactaaacagaagcattctcagaaactactttgtgatgattgcattcaagtcacagagttgaacattccctttgacggagcagtttcgaaactctctttgtgtagaatctgcaagtggagatatggaatgctttgaggactatggtagtaaaggaaatagcttcatataaaagctagacagtagcattctcagaaacttctttgtgatgcttgcattcaactcacagagttgaactttcctttcgagagagaagctttgaaacactctttttccagaatgtgcaagtggacatttggggagctttgaggcctgtggtggaaaaggaattatcttcccgtaaaagctagatagaagcattgtcagaaacttctttgagatgattgcattcaactcacagagttgaaggttccttttcaaacagcagtttccaatcactctttctgtggaatctgcaagtggatatttcgacctctttgaagatttcgttggaaacgggagaatcttcacagaaaagctaaacagaagcattctcagaaacttctctgtgatgtttgtgttcaactcccagagtttcacgttgcttttcatagagtagttctgaaacatgcttttcgtagtgtctgcaagtggacatttggagcgctttcaggcctgtggtggaaaacgaattatggtcacataaaaactggagagaagccttctcagaaacttctctgtgatgattgcattcaactcacagagttgaaccctcctatggatagagcagtgttgaaactctctttttgtggaatctgcaagtggatatgtggacctctccgaagatgtctttggaaacgggaatatcttcacataaaaactaaacagaagcattctcagaaacttcttggtgatgtttgcattcaaatcccagagttgaaccttcctttgatagttcaggtttgaaacactctttctgtaggatctgcaagtggctatttggaccactctgtggccttcgttcgaaacgggtatatcttcgcataaaatctagacagaagcattctcagaaaatactttgtgatgattgagtttaaatcacagagctgaccattcctttggatggagcaggtttgagacacactttttgtagaatctacaagtggatatttggacctctctgaggatttcgttggaaacgggataactgcacctaactaaacggaagcattctcagaaactgctttgtgatgattgtattcacctcacagagttgaacattcctattgatagagcagtttggaaacactcttgttgtggaatgtgcaagtggagatttggagcgctttgaggcctatggtagtaaagggaatagcttcatagaaaaactagacagatgcattctcaggaactttttggtgatgtttgtattcaactcccagagttgaactttcctttggaaagagcagctatgaaacactctttttctagaatctgcaagtggacgtttggagggctttgtggtttgtggtggaaaaggaaatatcttcacctaaatactagacagaagcattctcagaagcttctctgtgatgactgcattcaactcacggagttgaacactccttttgagagcgcagttttgaaactctctttctgtggcatctgcaaggggacatgtagacctctttgaagatttcgttggaaacggaatcatcttcacataaaaactatacagaagcagtctcagaatcttctttgtgatgtttgcattcaaatcccagagttgaactttcctttcaaagttcacgtttgaaacactctttttgcaggatctacaagtggatatttggaccactctgtgtccttcgttcgaaacgggtatatcttcacacgacatctagacagaagctttctcagaaaattctttgggatgattgagtggaactcacagagctgaacattccttgcgatgtagcagtttagaaacacactttctgcagaatctgcaagtgcatatttggacctctctgaggaattcgttggaaacgggataatttcagctgactaaacagaagcattctcagaaccttcttcgtgatgtctgcattcaactcacagtgtggaacctttctttgatagttcaggtttgaaacactctttttgtagaaactgcaaggggataattgcacttctttgaggcctaccgtagtaaaggaaataacttcctatagaaagaagacagaagcattctcagaaccctcttcgtgatgtttgcattcaactcacagtgctgaacctttctttgatagttcagctttgaaacactcttcttgtagaaactgcaagtggatatttggtcctctctgaggatttcgttggaaacgggataaaccgcacagaactaaacagaagcattctcagaaccttcttcgtgatgtttgcattcaactcacagtgttgaacctttctttgatagttcaggtttgaaacggtctttctgtagaaactgcaagtagatatttggacctctctgaggatttcgttggaaacgggataaaccgcacagaactaaaacagaagcattcacagaaaactcttggtgacgactgagtttaactcacagagctgaacattcctttggatggagcagtttcgaaacacactatttgtagaatgtgcaagtggatatttgggcctctctgaggatttcgttggaaacgggataaaccgcacagaactaaacagaagcattctcagaaactactttgtgatgattgcattcaagtcacagagttgaacattccctttgacagagcagtttggaaactctctttgtgtagaatctgcaagtggagatatggaccgctttgaggcctatggtagtaaaggaaatagcttcatataaaagctagacagtagcattctcagaaacttctttgtgatgcttgcattcaactcacagagttgaactttcctttcgagagagaagctttgaaacactctttttccagaatctgcaagtggacatttggagggctttgaggcctgtggtggaaaaggaattatcttcccataaaagctagatagaagcattgtcagaaacttctttgtgatgattgcattcaagtcacagagttgaaggttccttttcaaagagcagtttccaatcactctttctgtggaatctgcaagtggatatttggacctctttgaagatttcgttggaaacgggagaatcttcacagaaaagctaaacagaagcattctcagaaacttctctgtgatgtttgtgttcaactcccagagtttcacattgcttctcatagagtagttctgaaacatgcttttcgtagtgtctgcaagtggacatttggagcgctttcaggcctgtggtggaaaacgaattatggtcacataaaaactggagagaagccttctcagaaacttctctgtgacgattgcattcaactcacagagttgaaccctcctatggatagagcagtgttgaaactctctttttgtggaatctgcaagcggatatgtggacctctccgaagatgtctttggcaacgggaatatcttcacataaaaactaaacagaagcattcccagaaacttcttggtgatgtttgcattcaaatcccagagttgaaccttcctttgatagttcaggtttgaaacactctttttgtaggatctgcaagtggatatttggaccactctgtggccttcgttcgaaacgggtatatcttcgcataaaatctagacagaagcattctcagaaaatactttgtgatgattgagttgaactcacagagctgaacattcctttggatggagcaggtttgagacacactttttgtagaatctacaagtggatatttggacctctctgaggatttcgttggaaacgggataactgcacctaactaaacggaagccttctcagaaactgctttgtgatgattgcattcacctcacagagttgaacattcctattgatagagcagtttggaaacactcttgttgtggaatgtgcaagtggagatttggagcgctttgaggcctatggtagtaaagggaagagcttcatagaaaaacaagacagatgcattctcaggaactttttggtgatgtttgtattcaactcccagagttgaactttcctttggaaagagcagctatgaaacactctttttctagaatctgcaagtggacgtttggagggctttgtggtttgtggtggaaaaggaaatatcttcacctaaatactagatagaagcattctcagaagcttctctgtgatgactgcattcaactcacggagttgaacactccttttgagagcgtagttttgaaactctctttctgtggcatctgcaaggggacatgtagacctctttgaagatttcgttggaaacggaatcatcttcacataaaaactatacagaagcagtctcagaatcttctttgtgatgtttgcattcaaatccccgagttgaactttcctttcaaagttcacgtttgaaacactctttttgcaggatctacaagtggatatttggaccactctgtgtccttcgttcgaaacgggtatatcttcacatgacatctagacagaagctttctcagaaaattctttgggatgattgagttgaactcacagagctgagcattccttgcgatgtagcagtttagaaacacactttctgcagaatctgcaagtgcatatttggacctctgtgaggaattcgttggaaacgggataatttcagctgactaaacagaagcattctcagaaccttcttcgtgatgtctgcattcaactcacagtgtggaacctttctttgatagttcaggtttgaaacactctttctgtagaaactgcaaggggataattgcactctttgaggagtaccgtagtaaaggaaataacttcctataaaaagaagacagaagcattctcagaaccctcttcgtgatgtttgcattcaactcacagtgctgaacctttctttgatagttcagctttgaaacactctttttgtagaaactgcaagtggatatttggtcctctctgaggatttcgttggaaacgggataaactgcacagaactaaacagaagcattctcagaaccttcttcgtgatgtttgcattcaactcacagtgtggaacctttctttgatagttcaggtttgaaacggtctttctgtagaaactgcaagtagatatttggacctctctgaggatttcgttggaaacgggataacccgcacagaactaaaacagaagcattcacagaaaactcttggtgacgactgagtttaactcacagagctgaacattcctttggatggagcagtttcgaaacacactatttgtagaatgtgcaagtggatatttgggcctctctgaggatttcgttggaaacgggataaaccgcacagaactaaacagaagcattctcagaaactactttgtgatgattgcattcaagtcacagagttgaacattccctttgacagagcagtttggaaactctctttgtgtagaatctgcaagtggagatatggaccgctttgaggcctatggtagtaaaggaaatagcttcatataaaagctagacagtagcattctcaggaccttctttgtgatgcttgcattcaactcacagagttgaactttcctttcgagagagaagctttgaaacactctttttccagaatgtgcaagtggacatttggagggctttgaggcctgtggtggaaaaggaattatcttcccgtaaaagctagatagaagcattgtcagaaacttctttgtgatgattgcattcaagtcacagagttgaaggttccttttcaaagagcagtttccaatcactctttctgtggaatctgcaagtggatatttggacctctttgaagatttcgttggaaacgggagaatcttcacagaaaagctaaacagaagcattctcagaaacttctctgtgatgtttgtgttcaactcccagagtttcacgttgcttttcatagagtagttctgaaacatgcttttcgtagtgtctgcaagtggacatttggagcgctttcaggcctgtggtggaaaacgaattatggtcacataaaaactggagagaagccttctcagaaacttctctgtgatgattgcattcaactcacagagttgaaccctcctatggatagagcagtgttgaaactctctttttgtggaacctgcaagtggatatgtggacctctccgaagatgtctttggaaacgggaatatcttcacataaaaactaaacagaagcattctcagaaacttcttggtgatgtttgcattcaaatcccagagttgaaccttcctttgatagttcaggtttgaaacactctttttgtaggatctgcaagtggatatttggaccactccgtggccttcattcgaaacgggtacatcttcgcataaaatctagacagaagcattctcagaaaatactttgtgatgattgagtttaaatcacagagctgaccattcctttggatggagcaggtttgagacacactttttgtagaatctacaagtggatatttggacctctctgaggatttcgttggaaacgggataactgcacctaactaaacggaagcattctcagaaactgctttgtgatgattgcattcacctcacagagttgaacattcctattgatagagcagtttggaaacactcttgttgtggaatgtgcaagtggagatttggagcgctttgaggcctatggtagtaaagggaatagcttcatagaaaaactagacagatgcattctcaggaactttttggtgatgtttgtattcaactcccagagttgaactttcctttggaaagagcagctatgaaacactctttttctagaatctgcaagtggacgtttggagggctttgtggtttgtggtggaaaaggaaatatcttcacctaaatactagatagaagcattctcagaagcttctctgtgatgactgcattcaactcacggagttgaacactccttttgagagcgcagttttgaaactctctttctgtggcatctgcaaggggacatgtagacctctttgaagatttcgttggaaacggaatcatcttcacataaaaactatacagaagcagtctcagaatcttctttgtgatgtttgcattcaaatcccagagttgaactttcctttcaaagttcacgtttgaaacactctttttgcaggatctacaagtggatatttggaccactctgtgtccttcgttcgaaacgggtatatcttcacacgacatctagacagaagctttctcagaaaattctttgggatgattgagtggaactcacagagctgaacattccttgcgatgtagcagtttagaaacacactttctgcagaatctgcaagtgcatatttggacctctctgaggaattcgttggaaacgggataatttcagctgactaaacagaagcattctcagaaccttcttcgtgatgtctgcattcaactcacagtgtggaacctttctttgatagttcaggtttgaaacactctttttgtagaaactgcaaggggataattgcacttctttgaggcctaccgtagtaaaggaaataacttcctatagaaagaagacagaagcattcttcagaaccctcttcgtgatgtttgcattcaactcacagtgctgaacctttctttgatagttcagctttgaaacactcttcttgtagaaactgcaagtggatatttggtcctctctgaggatttcgttggaaacgggataaaccgcacagaactaaacagaagaattctcagagccctcttcgtgatgtttgcattcaactcacagtgctgaacctttctttgatagtgcagctttgaaacactctttttgtagaaactgcaagtggatgtttggtcctctctgaggatttcgttggaaacgggataaaccgcacagaactaaaacagaagcattgtcagaaacttctttgtgatgattgcattcaactcacagagttgaaggttccttttcaaacagcagtttccaatcactctttctgtggaatctgcaagtggatatttgggcctctctgaggatttcgttggaaacgggataaaacgcacagaactaaaacagaagcattctcagaaacttctctgtgatgtttgtgttcaactcccagagtttcacgttgcttttcatagagtagttctgaaacatgcttttcgtagtgtctgcaagtggacatttggagcgctttcaggcctgtggtggaaaacgaattatggtcacataaaaactggagagaagccttctcagaaacttctctgtgatgattgcattcaactcacagagttgaaccctcctatggatagagcagtgttgaaactctctttttgtggaatctgcaagtggatatgtggacctctccgaagatgtctttggaaacgggaatatcttcacataaaaactaaacagaagcattctcagaaacttcttggtgatgtttgcattcaaatcccagagttgaaccttcctttgatagttcaggtttgaaacactctttttgtaggatctgcaagtggctatttggaccactctgtggccttcgttcgaaacgggtatatcttcgcataaaatctagacagaagcattctcagaaaatactttgtgatgattgagttgaactcacagagctgaacattcctttggatggagcaggtttgagacacactttttgtagaatctacaagtggatatttggacctctctgaggatttcgttggaaacgggataactgcacctaactaaacggaagcattctcagaaactgctttgtgatgattgcattcacctcacagagttgaacattcctattgatagagcagtttgaaaacactcttgttgtggaatgtgcaagtggagatttggagcgctttgaggcctatggtagtaaagggaatagcttcatagaaaaactagacagatgcattcacaggaactttttggtgatgtttgtattcaactcccagagttgaactttcctttggaaagagcagctatgaaacactctttttctagaatctgcaagtggacgtttggagggctttgtggtttgtggtggaaaaggaaatatcttcacctaaatactagatagaagcattctcagaagcttctctgtgatgactgcattcaactcacggagttgaacactccttttgagagcgcagttttgaaactctctttctgtggcatctgcaaggggacatgtagacctctttgaagatttcgttgcaaacggaatcatcttcacataaaaactatacagaagcagtctcagaatcttctttgtgatgtttgcattcaaatcccagagttgaactttcctttcaaagttcacgtttgaaacactctttttgcaggatctacaagtggatatttggaccactctgtgtccttcgttcgaaacgggtatatcttcacatgacatctagacagaagctttctcagaaaattctttgagatgattgagtggaactcacagagctgaacattccttgcgatgtagcagtttagaaacacactttctgcagaatctgcaagtgcatatttggacctctctgaggaattcgttggaaacgggataatttcagctgactaaacagaagcattctcagaaccttcttcgtgatgtctgcattcaactcacagtgtggaagctttctttgatagttcaggtttgaaacactctttttgtagaaactgcaaggggataattgcacttctttgaggcctaccgtagtaaaggaaataacttcctatagaaagaagacagaagcattctcagaaccctcttcgtgatgtttgcattcaactcacagtgctgaacctttctttgatagttcagctttgaaacactcttcttgtagaaactgcaagtggatatttggtcctctctgaggatttcgttggaaacgggataaaccgcacagaactaaacagaagcattctcagaaccttcttcgtgatgtttgcattcaactcacagtgttgaacctttctttgatagttcaggtttgaaacggtctttctgtagaaactgcaagaagatatttggacctctctgaggatttcgttggaaacgggataaaccgcacagaactaaaacagaagcattcacagaaaactcttggtgacgactgagtttaactcacagagctgaacattcctttggatggagcagtttcgaaacacactatttgtagaatgtgcaagtggatatttgggcctctctgaggatttcgttggaaacgggataaaccgcacagaactaaacagaagcattctcagaaactactttgtgatgattgcattcaagtcacagagttgaacattccctttgacagagcagtttggaaactctctttctgtagaatctgcaagtggagatatggaccgctttcaggcctatggtagtaaaggaaatagcttcatataaaagctagacagtaacattctcagaaacttctttgtgatgcttgcattcaactcacagagttgaactttcctttcgagagagaagctttgaaacactctttttccagaatctgcaagtggacatttggagggctttgaggcctgtggtggaaaaggaattaacttcccgtaaaagctagatagaagcattgtcagaaacttctttgtgatgattgcattcaactcacagagatgaaggttccttttcaaacagcagtttccaaacagtctttctgtggaatctgcaagtggatatttggacctctttgaagatttcgttggaaacgggagaatcttcacagaaaagctaaacagaagcattctcacaaacttctctgtgatgtttgtgttcaactcccagagtttcacattgcttttcatagagtagttctgaaacatgcttttcgtagtgtctgcaagtggacatttggagcgctttcaggcctgtggtggaaaacgaattatggtcccataaaaactggagagaagccttctcagaaacttctctgtgatgattgcattcaactcacagatttgaaccctcctatggatagagcattgttgaaactctctttttgtggaatctgcaagtggatatgtggacctctccgaagatgtctttggaaacgggaatatcttcacataaaaactaaacagaagcattctcagaaacttcttggtgatgtttgcattcaaatcccagagttgaaccttcctgtgatagttcaggtttgaaacactctttttgtaggatatgcaagtggatatttggaccactctgtggccttccttcgaaacgggtacatcttcacataaaatctagacagaagcattctcagaaaatactttgtgatgattgagtttaactcacagagctgaacattcctttggatggagcaggtttgagacacactttttgtagaatctacaagtggatatttggacctctctgaggatttcgttggaaacgcgataactgcacctaactaaacggaagcattctcagaaactgctttgtgatgattgcattcacctcacagagttgaacattcctattgatagagcagtttggaaacactcttgttgtggaatgtgcaagtggagatttggagcgctttgaggcctatggtagtaaagggaatagcttcatagaaaaactagacagatgcattctcaggaactttttggtgatgtttgtattcaactcccagagttgaactttcctttggaaagagcagctatgaaacactctttttctagaatctgcaagtggacgtttggagggctttgtggtttgtggtggaaaaggaaatatcttcacctaaatactagatagaagcatcctcagaagcttctctgtgatgactgcattcaactcacggagttgaacactccttttgagagcgcagttttgaaactctctttctgtggcatctgcaaggggacatgtagacctctttgaagatttcgttggaaacggaatcatcttcacataaaaactatacagaagcagtctcagaatcttctttgtgatgtttgcattcaaatccccgagttgaactttcctttcaaagttcacgtttgaaacactctttttgcaggatctacaagtggatatttggaccactctgtgtccttcgttcgaaacgggtatatcttcacatgacatctagacagaagctttctcagaaaattctttgggatgattgagttgaactcacagagctgagcattccttgcgatgtagcagtttagaaacacactttctgcagaatctgcaagtgcatatttggacctctgtgaggaattcgttggaaacgggataatttcagctgactaaacagaagcattctcagaaccttcttcgtgatgtctgcattcaactcacagtgtggaacctttctttgatagttcaggtttgaaacactctttttgtagaaactgcaaggggatcattgcactctttgaggagtaccgtagtaaaggaaataacttcctataaaaagaagacagaagcattctcagaaccctcttcgtgatgtttgcattcaactcacagtgctgaacctttctttgatagttcagctttgaaacactctttttgtagaaactgcaagtggatatttggtcctctctgagcatttcgttggaaacgggataaactgcacagaactaaacagaagcattctcagaaccttcttcgtgatgtttgcattcaactcacagtgttgaacctttctttgatagttcaggtttcaaacggtctttctgtagaaactgcaagtagatatttggacctctctgaggatttcgttggaaacgggataacccgcacagaactaaaacagaagcattcacagaaaactcttggtgacgactgagtttaactcacagagctgaacattcctttggatggagcagtttcgaaacacactatttgtagaatgtgcaagtggatatttaggcctctctgaggatttcgttggaaacgggataaaccgcacagaactaaacagaagcattctcagaaactactttgtgatgattgcattcaagtcacagagttgaacattccctttgacagagcagtttggaaactctctttgtgtagaatctgcaagtggagatatggaccgctttgaggcctatggtagtaaaggaaatagcttcatataaaagctagacagtagcattctcagaaacttctttgtgatgcttgcattcaactcacagagttgaactttcctttcgagagagaagctttgaaacactctttttccagaatctgcaagtggacatttggagggctttgaggcctgtggtggaaaaggaattatcttcccgtaaaagctagatagaagcattgtcagaaacttctttgtgatgattgcattcaactcacagagttgaaggttccttttcaaagagcagtttccaatcactctttgtgtggaatctgcaagtggatatttggacctattttgaagatttcgttggaaacgggagaatcttcacaggaaagctaaacagaagcattctcagaaacttctctgtgatgtttgtgttcaactcccagagtttcacattgcttttcatagagtagttctgaaacatgcttttcgtagtgtctacaagtggacatttggagcgctttcaggcctgtggtggaaaacgaattatggtcacataaaaactggagagaagccttctcagaaacttctctgtgatgattgcattcaactcacagagttgaaccctcctatggatagagcagtgttgaaactctctttttgtggaatctgcaagtggatatgtggacctctccgaagatgtctttggaaacgggaatatcttcacataaaaactaaacagaagcattctcagaaacttcttggtgatgtttgcattcaaatcccagagttgaaccttcctttgctagttcaggtttgaaacactctttttgtaggatctgcaagtggatatttggaccactctgtggccttcgttcgaaacgggtatatcttcgcataaaatctagacagaagcattctcagaaaatactttgtgatgattgagtttaactcacagagctgaacattcctttggatggagcaggtttgagacacaccttttgtagaatctacaagtggatatttggacctctctgaggatttcgttggaaacgggataactgcacctaactaaacggaagcattctcagaaactgctttgtgatgattgcattcacctcacagagttgaacattcctattgatagagcagtttggaaacactcttgttgtggaatgtgcaagtggagatttggagcgctttgaggcctatggtagtaaagggaatagcttcatagaaaaactagacagatgcattctcaggaactttttggtgatgtttgtattcaactcccagagttgaactttcctttggaaagagcagctatgaaacactgtttttctagaatctgcaagtggacgtttggagggctttgtggtttgtggtggaaaaggaaatatcttcacctaaatactagatagaagcatcctcagaagcttctctgtgatgactgcattcaactcacggagttgaacactccttttgagagcgcagttttgaaactctctttctgtggcatctgcaaggggacatgtagacctctttgaagatttcgttggaaacggaatcatcttcacataaaaactacacagaagcagtctcagaatcttctttgtgatgtttgcattcaaatccccgagttgaactttcctttcaaagttcacgtttgaaacactctttttgcaggatctacaagtggatatttggaccactctgtgtccttcgttcgaaacgggtatatcttcacatgacatctagacagaagctttctcagaaaattctttgggatgattgagttgaactcacagagctgagcattccttgcgatgtagcagtttagaaacacactttctgcagaatctgcaagtgcatatttggacctctgtgaggaattcgttggaaacgggataatttcagctgactaaacagaagcattctcagaaccttcttcgtgatgtctgcattcaactcacagtgtggaacctttctttgatagttcaggtttgaaacactctttttgtagaaactgcaaggggataattgcactctttgaggagtaccgtagtaaaggaaataacttcctataaaaagaagacagaagcattctcagaaccctcttcgtgatgtttgcattcaactcacagtgctgaacctttctttgatagttcagctttgaaacactctttttgtagaaactgcaagtggatatttggtcctctctgaggatttcgttggaaacgggataaactgcacagaactaaacagaagcattctcagaaccttcttcgtgatgtttgcattcaactcacagtgttgaacctttctttgatagttcaggtttgaaacggtctttctgtagaaactgcaagtagatatttggacctctctgaggatttcgttggaaacgggataacccgcacagaactaaaacagaagcattcacagaaaactcttggtgacgactgagtttaactcacagagctgaacattcctttggatggagcagtttcgaaacacactatttgtagaatgtgcaagtggatatttaggcctctctgaggatttcgttggaaacgggataaaccgcacagaactaaacagaagcattctcagaaactactttgtgatgattgcattcaagtcacagagttgaacattccctttgacagagcagtttggaaactctctttgtgtagaatctgcaagtggagatatggaccgctttgaggcctatggtagtaaaggaaatagcttcatataaaagctagacagtagcattctcagaaacttctttgtgatgcttgcattgaactcacagagttgaactttcctttcgagagagaagctttgaaacactctttttccagaatctgcaagtggacatttggagggctttgaggcctgtggtggaaaaggaattatcttcccgtaaaagctagatagaagcattgtcagaaacttctttgtgatgattgcattcaactcacagagttgaaggttccttttcaaagagcagtttccaatcactctttgtgtggaatctgcaagtggatatttggacctattttgaagatttcgttggaaacgggagaatcttcacaggaaagctaaacagaagcattctcagaaacttctctgtgatgtttgtgttcaactcccagagtttcacattgcttttcatagagtagttctgaaacatgcttttcgtagtgtctacaagtggacatttggagcgctttcaggcctgtggtggaaaacgaattatggtcacataaaaactggagagaagccttctcagaaacttctctgtgatgattgcattcaactcacagagttgaaccctcctatggatagagcagtgttgaaactctctttttgtggaatctgcaagtggatatgtggacctctccgaagatgtctttggaaacgggaatatcttcacataaaaactaaacagaagcattctcagaaacttcttggtgatgtttgcattcaaatcccagagttgaaccttcctttgatagttcaggtttgaaacactctttttgtaggatctgcaagtggatatttggaccactctgtggccttcgttcgaaacgggtatatcttcgcataaaatctagacagaagcattctcagaaaatactttgtgaagattgagtttaactcacagagctgaacattcctttggatggtgcaggtttgagacacactttttgtagaatctacaagtggatatttggacctctctgaggatttcattggaaacgggataactgcacctaactaaacggaagcattctcagaaactgctttgtgatgattgcattcacctcacagagttgaacattcctattgatagagcagtttggaaacactcttgttgtggaatgtgcaagtggagatttggagcgctttgaggcctgtggtagtaaagggaatagcttcatagaaaaactagacagatgcattctcaggaaccttttggtgatgtttgtattcaactcccagagttgaactttcctttggaaagagcagctatgaaacactctttttctagaatctgcaagtggacgtttggagggctttgtggtttgtggtggaaaaggaaatatcttcacctaaatactagatagaagcattctcagaagcttctctgtgatgactgcattcaactcacggagttgaacactccttttgagagcgcagttttgaaactctctttctgtggcatctgcaaggggacatgtagacctctttgaagatttcgttggaaacggaatcatcttcacataaaaactatacagaagcagtctcagaatcttctttgtgatgtttgcattcaaatcccagagttgaactttcctttcaaagttcacgtttgaaacactctttttgcaggatctacaagtggatatttggaccactctgtgtccttcgttcgaaacgggtatatcttcacacgacatctagacagaagctttctcagaaaattctttgggatgattgagtggaactcacagagctgaacattccttgcgatgtagcagtttagaaacacactttctgcagaatctgcaagtgcatatttggacctctctgaggaattcgttggaaacgggataatttcagctgactaaacagaagcattctcagaaccttcttcgtgatgtctgcattcaactcacagtgtggaacctttctttgatagttcaggtttgaaacactctttttgtagaaactgcaaggggataattgcacttctttgaggcctaccgtagtaaaggaaataacttcctatagaaagaagacagaagcattctcagaaccttcttcgtgatgtttgcattcaactcacagtgctgaacctttctttgatagttcagctttgaaacactctttttgtagaaactgcaagtggatacttggtcctctctgaggatttcgttggaaaagggataaaccgcacagaactaaacagaagcattctcagaaccttcttcgtgatgtttgcattcaactcacagtgttgaacctttctttgatagttgaggttggaaacggtctttctgtagaaactgcaagtagatatttggacctctctgaggatttcgttggaaacgggataaaccacacagaactaaaacagaagcattcacagaaaactcttggtgacgactgagtttaactcacagagctgaacattcctttggatggagcagtttcgaaacacactatttgtagaatgtgcaagtggatatttgggcctctctgaggatttcgttggaaacgggataaaccgtacagaactaaacagaagcattctcagaaactactttgtgatgattgcattcaagtcacagagttgaacattccctttgacagagcagtttggaaactctctttgcgtagaatctgcaagtggagatatggaccgctttgaggcctatggtagtaaaggaaatagcttcatatgaaagctagacagtagcattctcagaaacttctttgtgatgcttgcattcaactcacagagttgaactttcctttcgagagagaagctttgaaacactctttttccagaatgtgcaagtggagatttggagggctttgaggcctgtggtggaaaaggaattatcttcccgtaaaagctagatggaagcattgtcagaaacttctttgtgatgattgcattcaactcacagagttgaaggttccttttcaaacagcagtttccaatcactctttctgtggaatctgcaagtggatatttggacctagtttgaagatttcgttggaaacgggagaatcttcacagaaaagctaaacagaagcattctcagaaacttctctgtgatgtttgtgttcaactcccagagtttcacattgcttttcatagagtagttctgaaacatgcttttcgtagtgtctgcaagtggacatttggagcgctttcaggcctgtggtggaaaacgaattatggtcacataaaaactggagagaagccttctcagaaacttctctgtgatgattgcattcaactcacagagttgaaccctcctatggatagagcagtgttgaaactctctttttgtggaatctgcaagtggatatgtggacctctccgaagatgtctttggaaacgggaatatcttcacataaaaactaaacagaagcattctcagaaacttcttggtgatgtttgcattcaaatcccagagttgaaccttcctttgatagttcaggtttgaaacactctttctgtaggatctgcaagtggctatttggaccactctgtggccttcgttcgaaacgggtatatcttcgcataaaatctagacagaagcattctcagaaaatactttgtgatgattgagtttaaatcacagagctgaccattcctttggatggagcaggtttgagacacactttttgtagaatctacaagtggatatttggacctctctgaggatttcgttggaaacgggaaaactgcacctaactaaacggaggcattctcagaaactgctttgtgatgattgcattcacctcacagagttgaacattcctattgatagagcagtttggaaacactcttgttgtggaatgtgcaagtggagatttggagcgctttgaggcctgtggtagtaaagggaatagcttcatagaaaaactagacagatgcattctcaggaactttttggtgatgtttgtattcaactcccagagttgaactttcctttggaaagagcagctatgaaacactctttttctagaatctgcaagtggacgtttggagggctttgtggtttgtggtggaaaaggaaatatcttcacctaaatactagatagaagcattctcagaagcttctctgtgatgactgcattcaactcacggagttgaacactccttttgagagcgcagttttgaaactctctttctgtggcatctgcaaggggacatgtagacctctttgaagatttcgttggaaacggaatcatcttcacataaaaactatacagaagcagtctcagaatcttctttgtgatgtttgcattcaaatcccagagttgaactttcctttcaaagttcacgtttgaaacactctttttgcaggatctacaagtggatatttggaccactctgtgtccttcgttcgaaacgggtatatcttcacacgacatctagacagaagctttctcagaaaattctttgggatgattgagtggaactcacagagctgaacattccttgcgatgtagcagtttagaaacacactttctgcagaatctgcaagtgcatatttggacctctctgaggaattcgttggaaacgggataatttcagctgactaaacagaagcattctcagaaccttcttcgtgatgtctgcattcaactcacagtgtggaacctttctttgatagttcaggtttgaaacactctttttgtagaaactgcaaggggataattgcacttctttgaggcctaccgtagtaaaggaaataacttcctatagaaagaagacagaagcattctcagaaccctcttcgtgatgtttgcattcaactcacagtgctgaacctttctttgatagttcagctttgaaacactcttcttgtagaaactgcaagtggatatttggtcctctctgaggatttcgttggaaacgggataaaccgcacagaactaaacagaagaattctcagagccctcttcgtgatgtttgcattcaactcacagtgctgaacctttctttgatagtgcagctttgaaacactctttttgtagaaactgcaagtggatgtttggtcctctctgaggatttcgttggaaacgggataaaccgcacagaactaaaacagaagcattgtcagaaacttctttgtgatgattgcattcaactcacagagttgaaggttccttttcaaacagcagtttccaatcactctttctgtggaatctgcaagtggatatttgggcctctctgaggatttcgttggaaacgggataaaacgcacagaactaaaacagaagcattctcagaaacttctctgtgatgtttgtgttcaactcccagagtttcacgttgcttttcatagagtagttctgaaacatgcttttcgtagtgtctgcaagtggacatttggagcgctttcaggcctgtggtggaaaacgaattatggtcacataaaaactggagagaagccttctcagaaacttctctgtgatgattgcattcaactcacagagttgaaccctcctatggatagagcagtgttgaaactctctttttgtggaatctgcaagtggatatgtggacctctccgaagatgtctttggaaacgggaatatcttcacataaaatctaaacagaagcattctcagaaacttcttggtgatgtttgcattcaaatcccagagttgaaccttcctttgatagttcaggtttgaaacactctttttgtaggatctgcaagtggatatttggaccactctgtggccttcgttcgaaacgggtatatcttcgcataaaatctggacagaagcattctcagaaaatactttgtgatgattgagtttaaatcacagagctgaccattcctttggatggagcaggtttgagacacactttttgtagaatctacaagtggatatttggacctctctgaggatttcgttggaaacgggataactgcacctaactaaacggaagcattctcagaaactgctttgtgatgattgcattcacctcacagagttgaacattcgtattgatagagcagtttggaaacactcttcttgtggaatgtgcaagtggagatttggagcgctttggggcctatggtagtaaagggaatagcttcatagaaaaactagacagatgcattctcaggaactttttggtgatgtttgtattcaactcccagagttgaactttcctttggaaagagcagctatgaaacactctttttctagaatctgcaagtggacgtttggagggctttgtggtttgtggtggaaaaggaaatatcttcacctaaatactagatagaagcatcctcagaagcttctctgtgatgactgcattcaactcacggagttgaacactccttttgagagcgcagttttgaaactctctttctgtggcatctgcaaggggacatgtagacctctttgaagatttcgttggaaacggaatcatcttcacataaaaactatacagaagcagtctcagaatcttctttgtgatgtttgcattcaaatccccgagttgaactttcctttcaaagttcacgtttgaaacactctttttgcaggatctacaagtggatatttggaccactctgtgtccttcgttcgaaacgggtatatcttcacatgacatctagacagaagctttctcagaaaattctttgggatgattgagttgaactcacagagctgagcattccttgcgatgtagcagtttagaaacacactttctgcagaatctgcaagtgcatatttggacctctgtgaggaattcgttggaaacgggataatttcagctgactaaacagaagcattctcagaaccttcttcgtgatgtctgcattcaactcacagtgtggaacctttctttgatagttcaggtttgaaacactctttttgtagaaactgcaaggggataattgcactctttgaggagtaccgtagtaaaggaaataacttcctataaaaagaagacagaagcattctcagaaccctcttcgtgatgtttgcattcaactcacagtgctgaacctttctttgatagttcagctttgaaacactctttttgtagaaactgcaagtggatatttggtcctctctgagcatttcgttggaaacgggataaactgcacagaactaaacagaagcattctcagaaccttcttcgtgatgtttgcattcaactcacagtgttgaacctttctttgatagttcaggtttgaaacggtctttctgtagaaactgcaagtagatatttggacctctctgaggatttcgttggaaacgggataacccgcacagaactaaaacagaagcattcacagaaaactcttggtgacgactgagtttaactcacagagctgaacattcctttggatggagcagtttcgaaacacactatttgtagaatgtgcaagtggatatttaggcctctctgaggatttcgttggaaacgggataaaccgcacagaactaaacagaagcattctcagaaactactttgtgatgattgcattcaagtcacagagttgaacattccctttgacagagcagtttggaaactctctttgtgtagaatctgcaagtggagatatggaccgctttgaggcctatggtagtaaaggaaatagcttcatataaaagctagacagtagcattctcagaaacttctttgtgatgcttgcattcaactcacagagttgaactttcctttcgagagagaagctttgaaacactctttttccagaatctgcaagtggacatttggagggctttgaggcctgtggtggaaaaggaattatcttcccgtaaaagctagatagaagccttctcagaaacttctctgtgatgattgcattcaactcacagagttgaaggttccttttcaaagagcagtttccaatcactctttctgtggaatctgcaagtggatatttggacctattttgaagatttcgttggaaacgggagaatcttcacaggaaagctaaacagaagcattctcagaaacttcttggtgatgtttgcattcaaatcccagagtagaaccttcctttgatagttcaggtttgaaacactctttttgtaggatctgcaagtggatatttggaccactctgtggccttcgttcgaaacgggtatatcttcgcataaaatctagacagaagcattctcagaaaatactttgtgatgattgagtttaactcacagagctgaacattcctttggatggagcaggtttgagacacactttttgtagaatctacaagtggatatttggacctctctgaggatttcgttggaaacgggataactgcacctaactaaacggaagcattctcagaaactgctttgtgatgattgcattcacctcacagagttgaacattcctattgatagagcagtttggaaacactcttgttgtggaatgtgcaagtggagatttggagcgctttgaggcctatggtagtaaagggaatagcttcatagaaaaactagacagatgcattctcaggaactttttggtgatgtttgtattcaactcccagagttgaactttcctttggaaagagcagctatgagacactgtttctctagaatctgcaagtggacgtttggagggctttgtggtttgtggtggaaaaggaaatatcttcacctaaatactagatagaagcattctcagaagcttctctgtgatgactgcattcaactcagggagttgaacactccttttgagagcgcagttttgaaactctctttctgtggcatctgcaaggggacatgtagacctctttgaagatttcgttggaaacggaatcatcttcacataaaaactatacagaagcagtctcagaatcttctttgtgatgtttgcattcaaatccccgagttgaactttcctttcaaagttcacgtttgaaacactctttttgcaggatctacaagtggatatttggaccactctgtgtccttcgttcgaaacgggtatatcttcacatgacatctagacagaagctttctcagaaaattctttgggatgattgagtggaactcacagaagctgaacattccttgcgatgtagcagtttagaaacacactttctgcagaatctgcaagtgcatatgtggacctctctgaggaattcgttggaaacgggataatttcagctgactaaacagaagcattctcagaaccttcttcgtgatgtctgcattcaactcacagtgtggaacctttctttgatagttcaggtttgaaacactctttttgtagaaactgcaaggggataattgcacttctttgaggcctaccgtagtaaaggaaataacttcctatagaaagaagacagaagcattctcagaaccctcttcgtgatgtttgcattcaactcacagtgctgaacctttctatgatagttcagctttgaaacactcttcttgtagaaactgcaagtggatatttggtcctctctgaggatttccttggaaacgggataaaccgcacagaactaaacagaagcattcacagaaaactcttggtgacgactgagtttaactcacagagctgaacattcctttggatggagcagtttcgaaacacactatttgtagaatctgcaagtggatatttgggcctctctgaggatttcgttggaaacgggataaaccgcacagaactaaaacagaagcattctgagaaactactttgtgatgattgcattcaagtcacagagctgaacattccctttgacagagcagtttggaaactctctttgtgtagaatctgcaagtggagatatggaatgctttgaggactatggtagtaaaggaaatagcttcatataaaagctagacagtagcattctcagaaacttctttgtgatgcttgcattcaactcacagagttgaactttcctttcgagagagaagctttgaaacactctttttccagaatctgcaagtggacatttggagggctttgaggcctgtggtggaaaaggaattatcttcccgtaaaagctggatagaagcattgtcagaaacttctttgtgatgattgcattcaactcacagagttgaaggttccttttcaaacagcagtttccaaacactctttctgtggaatctgcaagtggatatttggacctctttgaagatttcgttggaaacgggataaccttcacagaaaagctaaacagaagcattctcagaaacttctctgtgatgtttgtgttcaactcccagagtgtcacattgcttctcatagagtagttctgaaacatgcttttcgtagtgtctgcaagtggacatttggagcgctttcaggcctgtggtggaaaacgaattatggtcacataaaaactggacagaagccttctcagaaacttctctgtgatgattgcattcaactcacagagttgaaccctcctatggatagagcagtgttgaaactctctttttgtggaatctgcaagtggatatgtggacctctccgaagatgtgtttggaaacgggactatcttcacataaaaactaaacagaagcattctcagaaacttcttggtgatgtttgcattcaaatcccagagttgaaccttcctttgatagttcaggtttgaaacactctttttgtaggatctgcaagtggatatttggaccactctgtggccttcgttcgaaacgggtacatcttcgcataaaatctagacagaagcattctcagaaaatactttgtgatgattgagtttaactcacagagctgaacattcctttggatggagcaggtttgagacacaccttttgtagaatctacaagtggatatttggacctctctgaggatttcgttggaaacgggataactgcacctaactaaacggaagcattctcagaaactgctttgtgatgattgcattcacctcaccagagttgaacattcctattgatagagcagtttggaaacactcttgttgtggaatgtgcaagtggagatttggagcgctttgaggcctatggtagtaaagggaatagcttcatagaaaaactagacagatgcattctcaggaactttttggtgatgtttgtattcaactcccagcagttgaactttcctttggaaagagcagctatgaaacactctttttctagaatctggaagtggacgtttggagggctttgtggtttgtggtggaaaaggaaatatcttcacctaaatactagatagaagcattctcagaagcttctctgtgatgactgcattcaactcacggagttgaacactccttttgagagcgcagttttgaaactctctttctgtggcatctgcaaggggacatgtagacctctttgaagatttcgttggaaacggaatcatcttcacataaaaactatacagaagcagtctcagaatcttctttgtgatgtttgcattcaaatcccagagttgaactttcctttcaaagttcacgtttgaaacactctttttgcaggatctacaagtggatatttggaccactctgtgtccttcgttcgaaacgggtatatcttcacatgacatctagacagaagctttctcagaaaattctttgggatgattgagtggaactcacagagctgaacattccttgcgatgtagcagtttagaaacacactttctgcagaatctgcaagtgcatatttggacctctctgaggaattcgttggaaacgggataatttcagctgactaaacagaagcattctcagaacctttttcgtgatgtctgcattcaactcacagtgtggaacctttctttgatagttcaggtttgaaacactctttttgtagaaaatgcaaggggataattgcacttctttgaggcctaccgtagtaaaggaaataacttcctatagaaagaagacagaagcattctcagaaccctcttcgtgatgtttgcattcaactcacagtgctgaacctttctttgatagttcagctttgaaacactcttcttgtagaaactgcaagtggatatttggtcctctctgaggatttcgttggaaacgggataaaccgcacagaactaaacagaagaattctcagagccctcttcgtgatgtttgcattcaactcacagtgctgaacctttctttgatagtgcagctttgaaacactctttttgtagaaactgcaagtggatgtttggtcctctctgaggatttcgttggaaacgggataaaccgcacagaactaaaacagaagcattgtcagaaacttctttgtgatgattgcattcaactcacagtagttgaaggttccttttcaaacagcagtttccaatcactctttctgtggaatctgcaagtggatatttgggcctctctgaggatttcgttggaaacgggataaaacgcacagaactaaaacagaagcattctcagaaacttctctgtgatgtttgtgttcaactcccagagtttcacgttgcttttcatagagtagttctgaaacatgcttttcgtagtgtctgcaagtggacatttggagcgctttcaggcctgtggtggaaaacgaattatggtcacataaaaactggagagaagccttctcagaaacttctctgtgatgattgcattcaactcacagagttgaaccctcctatggatagagcagtgttgaaactctctttttgtggaatctgcaagtggatatgtggacctctccgaagatgtctttggaaacgggaatatcttcacataaaaactaaacagaagcattctcagaaacttcttggtgatgtttgcattcaaatcccagagttgaaccttcctttgatagttcaggtttgaaacactctttctgtaggatctgcaagtggctatttggaccactctgtggccttcgttcgaaacgggtatatcttcgcataaaatctagacagaagcattctcagaaaatactttgtgatgattgagtttaaatcacagagctgaccattcctttggatggagcaggtttgagacacactttttgtagaatctacaagtggatatttggacctctctgaggatttcgttggaaacgggataactgcacctaactaaaccggaagcattctcagaaactgctttgtgatgattgcattcacctcacagagttgaacattcctattgatagagcagtttggaaacactcttgttgtggaatgtgcaagtggagatttggagcgctttgaggcctatggtagtaaagggaatagcttcatagaaaaactagacagatgcattctcaggaactttttggtgatgtttgtattcaactcccagagttgaactttcctttggaaagagcagctatgaaacactctttttctagaatctgcaagtggacgtttggagggctttgtggtttgtggtggaaaaggaaatatcttcacctaaatactagagagaagcattctcagaagcttctctgtgatgactgcattcaactcacggggttgaacactccttttgggagcgcagttttgaaactctctttctgtggcatctgcaaggggacatgtagacctctttgaagatttcgttggaaacggaatcatcttcacataaaaactatacagaagcagtctcagaatcttctttgtgatgtttgcattcaaatcccagagttgaactttcctttcaaagttcacgtttgaaacactttttgcaggatctacaagtggatatttggaccactctgtgtccttcgttcgaaacgggtatatcttcacatgacatctagacagaagctttctcagaaaattgtttgggatgattgatttgaactcacagagctgagcattccttgcgatgtagcagtttagaaacacactttctgcagaatctgcaagtgcatatgtggacctctctgaggaattcgttggaaacgggataatttcagctgactaaacagaagcattctcagaaccttcttcgtgatgtctgcattcaactcacagtgtggaacctttctttgatagttcaggtttgaaacactctttttgtagaaactgcaaggggataattgcactctttgaggagtaccgtagtaaaggaaataacttcctataaaaagaagacagaagcattctcagaaccctcttcgtgatgtttgcattcaactcacagtgctgaacctttctttgatagtgcagctttgaaacactctttttgtagaaactgcaaatggatatttggtcctctctgaggatttcgttggaaaagggataaaacgcacagaactaaacagaagcattcacagaaaactcttggtgacgactgagtttaactcacagagctgaacattcctttggatggagcagtttcaaaacacactatttgtagaatctgcaagtggatatgtgggcctctctgaggatttcgttggaaacgggataaaccgcacagaactaaaacagaagcattctcagaaactactttgtgatgattgcattcaagtcacagagttgaacattccctttgacagagcagtttggaaactctctttgtgtagaatctgcaagtggagatatggaccgcgttgaggcccatggtagtaaaggaaatagcttcatataaaagctagacagtagcattctcagaaacttctttgtgatgcttgcattcaactcacagagttgaactttcctttcgagagagaagctttgaaacactctttttccagaatctgcaagtggacatttggagggctttgaggcctgtggtggaaaaggaattatcttcccgtaaaagctagatagaagcattgtcagaaacttctttgtgatgattgcattcaactcacagagttgaaggttccttttcaaagagcagtttccaatcactctttctgtggaatctgcaagtggatatttggacctctttgaagatttcgttggaaacgggagaatcttcacagaaaagctaaacagaagcattctcagaaacttctctgtgatgtttgtgttcaactcccagagtttcacattgcttttcatagagtagttctgaaacatgcttttcgtagtgtctacaagtggacatttggagcgttttcaggcctgtggtggaaaacgaattatggtcacataaaaactggagagaagccttctcagaaacttctctgtgatgattgcattcaactcacagagttgaaccctcctatggatagagcagtgttgaaactctctttttgtggaatctgcaagtggatatgtggacctctccgaagatgtctttggaaacgggaatatcttcacataaaaactaaacagaagcattctcagaaacttcttggtgatgtttgcattcaaatcccagagttgaaccttcctttgatagttcaggtttgaaacactctttttgtaggatctgcaagtggatatttggaccactctgtggccttcgttcgaaacgggtatatcttcgcataaaatctagacagaagcattctcagaaaatactttgtgatgattgagtttaactcacagagctgaacattcctttggatggagcaggtttgagacacactttttgcagaatctacaagtggatatttggacctctctgaggatttcgttggaaacgggataactgcacctaactaaacggaagcattctcagaaactgctttgtgatgattgcattcacctcacagagttgaacattcctattgatagagcagtttggaaacagtcttgttgtggaatgtgcaagtggagatttggagcgctttgaggtctatggtagtaaagggaatagcttcatagaaaaactagacagatgcattctcaggaactttttggtgatgtttgtattcaactcccagagttcaactttcctttggaaagagcagctatgaaacactctttttctagaatctgcaagtggacgtttggagggctttgcggtttgtggtggaaaaggaaatatcttcacctaaatactagatagaagcattctcagaagcttctctgtgatgactgcattcaactcacggagttgaacactccttttgagagcgcagttttgaaactctctttctgtggcatctacaaggggacatgaagacctctttgaagatttcgttggaaacggaatcatcttcacataaaaactatacagaagcagtctcagaatcttctttgtgatgtttgcattcaaatcccagagttgaactttcctttcaaagttcacgtttgaaacactctttttgcaggatctacaagtggatatttggaccactctgtgtccttcgttcgaaacgggtatatcttcacatgacatctagacagaagctttctcagaaaattctttgggatgattgagtggaactcacagagctgaacattccttgcgatgtagcagtttagaaacacactttctgcagaatctgcaagtgcatatttggacctctctgaggaattcgttggaaacgggataatttcagctgactaaacagaagcattctcagaacttcttcgtgatgtctgcattcaactcacagtgtggaacctttctttgatagttcaggtttgaaacactctttttgtagaaactgcaaggggataattgcacttctttgaggcctaccgtagtaaaggaaataacttcctatagaaagaagacagaagaattctcagagccctcttcgtgatgtttgcattcaactcacagtgctgaacctttctttgatagtgcagctttgaaacactctttttgtagaaactgcaagtggatgtttggtcctctgctgaggatttcgttggaaacgggataaaccgcacagaactaaaacagaagcattctcagaaccttcttcgtgatgtttgcattcaactcacagtgttgaacctttctttgatagttcaggtttgaaacggtctttctgtagaaactgcaagtagatatttggacctctctgaggatttcgttggaaacgggataacccgcacagaactaaaacagaagcattcacagaaaactcttggtgacgactgagtttaactcacagagctgaacattcctttggatggagcagtttcgaaacacactatttgtagaatgtgcaagtggatatttgggcctctctgaggatttcgttggaaacgggataaaccgcacagaactaaacagaagcattctcagaaactactttgtgatgattgcattcaagtcacagagttgaacattccctttgacagagcagtttggaaactctctttgtgtagaatctgcaagtggagatatggaccgctttgaggcctatggtagtaaaggaaatagcttcatataaaagctagacagtagcattctcagaaacttctttgtgatgcttgcattcaactcacagagttgaactttcctttcgagagagaagctttgaaacactctttttccagaatctgcaagtggacatttggagggctttgaggcctgtggtggaaaaggaattatcttcccgtaaaagctagatagaagcattgtcagaaacttctttgtgatgattgcattcaactcacagagttgaaggttccttttcaaagagcagtttccaatcactctttgtgtggaatctgcaagtggatatttggacctattttgaagatttcgttggaaacgggagaatcttcacaggaaagctaaacagaagcattctcagaaacttctctgtgatgtttgtgttcaactcccagagtttcacattgcttttcatagagtagttctgaaacatgcttttcgtagtgtctgcaagtggacatttggagcgctttcaggcctgtggtggaaaacgaattatggtcacataaaaactggagagaagccttctcagaaacttctctgtgatgattgcattcaactcacagagttgaaccctcctatggatagagcagtgttgaaactctctttttgtggaatctgcaagtggatatgtggacctctccgaagatgtctttggaaacgggaatatcttcacataaaaactaaacagaagcattctcagaaacttcttggtgatgtttgcattcaaatcccagagttgaaccttcctttgatagttcaggtttgaaacactctttctgtaggatctgcaagtggctatttggaccactctgtggccttcgttcgaaacgggtatatcttcgcataaaatctagacagaagcattctcagaaaatactttgtgatgattgagtttaaatcacagagctgaccattcctttggatggagcaggtttgagacacactttttgtagaatctacaagtggatatttggacctctctgaggatttcgttggaaacgggataactgcacctaactaaacggaagcattctcagaaactgctttgtgatgattgcattcacctcacagagttgaacattcctattgatagagcagtttggaaacactcttgttgtggaatgtgcaagtggagatttggagcgctttgaggcctatggtagtaaagggaatagcttcatagaaaaactagacagatgcattctcaggaactttttggtgatgtttgtattcaactcccagagttgaactttcctttggaaagagcagctatgaaacactctttttctagaatctgcaagtggacgtttggagggctttgtggtttgtggtggaaaaggaaatatcttcacctaaatactagatagaagcattctcagaagcttctctgtgatgactgcattcaactcacggagttgaacactccttttgagagcgtagttttgaaactctctttctgtggcatctgcaaggggacatgtagacctctttgaagatttcgttggaaacggaatcatcttcacataaaaactatacagaagcagtctcagaatcttctttgtgatgtttgcattcaaatcccagagttgaactttcctttcaaagttcacgtttgaaacactctttttgcaggatctacaagtggatatttggaccactctgtgtccttcgttcgaaacgggtatatcttcacacgacatctagacagaagctttctcagaaaattctttgggatgattgagtggaactcacagagctgaacattccttgcgatggagcagtttagaaacacactttctgcagaatctgcaagtgcatatttggacctctctgaggaattcgttggaaacgggataatttcagctgactaaacagaagcattctcagaaccttcttcgtgatgtctgcattcaactcacagtgtggaacctttctttgatagttcaggtttgaaacactctttttgtagaaactgcaaggggataattgcacttctttgaggcctaccgtagtaaaggaaataacttcctatagaaagaagacagaagcattctcagaaccctcttcgtgatgtttgcattcaactcacagtgctgaacctttctttgatagttcagctttgaaacactcttcttgtagaaactgcaagtggatatttggtcctctctgaggatttcgttggaaacgggataaaccgcacagaactaaacagaagaattctcagagccctcttcgtgatgtttgcattcaactcacagtgctgaacctttctttgatagtgcagctttgaaacactctttttgtagaaactgcaagtggatgtttggtcctctctgaggatttcgttggaaacgggataaaccgcacagaactaaaacagaagcattgtcagaaacttctttgtgatgattgcattcaactcacagagttgaaggttccttttcaaacagcagtttccaatcactctttctgtggaatctgcaagtggatatttgggcctctctgaggatttcgttggaaacgggataaaacgcacagaactaaaacagaagcattctcagaaacttctctgtgatgtttgtgttcaactcccagagtttcacgttgcttttcatagagtagttctgaaacatgcttttcgtagtgtctgcaagtggacatttggagcgctttcaggcctgtggtggaaaacgaattatggtcacataaaaactggagagaagccttctcagaaacttctctgtgatgattgcattcaactcacagagttgaaccctcctatggatagagcagtgttgaaactctctttttgtggaatctgcaagtggatatgtggacctctccgaagatgtctttggaaacgggaatatcttcacataaaaactaaacagaagcattctcagaaacttcttggtgatgtttgcattcaaatcccagagttgaaccttcctttgatagttcaggtttgaaacactctttctgtaggatctgcaagtggctatttggaccactctgtggccttcgttcgaaacgggtatatcttcgcataaaatctagacagaagcattctcagaaaatactttgtgatgattgagtttaaatcacagagctgaccattcctttggatggagcaggtttgagacacactttttgtagaatctacaagtggatatttggacctctctgaggatttcgttggaaacgggataactgcacctaactaaacggaagcattctcagaaactgctttgtgatgattgcattcacctcacagagttgaacattcctattgatagagcagtttggaaacactcttgttgtggaatgtgcaagtggagatttggagcgctttgaggcctatggtagtaaagggaatagcttcatagaaaaactagacagatgcattctcaggaactttttggtgatgtttgtattcaactcccagagttgaactttcctttggaaagagcagctatgaaacactctttttctagaatctgcaagtggacgtttggagggctttgtggtttgtggtggaaaaggaaatatcttcacctaaatactagatagaagcattctcagaagcttctctgtgatgactgcattcaactcacggagttgaacactccttttgagagcgcagttttgaaactctctttctgtggcatctgcaaggggacatgtagacctctttgaagatttcgttggaaacggaatcatcttcacataaaaactatacagaagcagtctcagaatcttctttgtgatgtttgcattcaaatcccagagttgaactttcctttcaaagttcacgtttgaaacactctttttgcaggatctacaagtggatatttggaccactctgtgtccttcgttcgaaacgggtatatcttcacacgacatctagacagaagctttctcagaaaattctttgggatgattgagtggaactcacagagctgaacattcccttgcgatgtagcagtttagaaacacactttctgcagaatctgcaagtgcatatttggacctctctgaggaattcgttggaaacgggataatttcagctgactaaacagaagcattctcagaaccttcttcgtgatgtctgcattcaactcacagtgtggaacctttctttgatagttcaggtttgaaacactctttttgtagaaactgcaaggggataattgcacttctttgaggcctaccgtagtaaaggaaataacttcctatagaaagaagacagaagcattctcagaaccctcttcgtgatgtttgcattcaactcacagtgttgaacctttctttgagagttcagctttgaaacggtctttctgtagaaaatgcaagtagatatttggacctctctgcggatttctttggaaacgggataaaccgcacagaactaaaacagaagcattctcagaaccttcttcgtgatgtttgcattcaactcacagtgttgaacctttctttgatagttcaggttggaaacggtctttctgtagaaactgcaagtagatatttggacctctctgaggatttcgttggaaacgggataaaccgcacagaactaaaacagaagcattcacagaaaactcttggtgacgactgagtttaactcacagagctgaacattcctttggatggagcagtttcgaaacacactatttgtagaatgtgcaagtggatatgtgggcctctctgaggatttcgttggaaacgggataaaccgcacagaactaaacagaagcattctcagaaactactttgtgatgattgcattcaagtcacagagttgaacattccctttgacagagcagtttggaaactctctttgcgtagaatctgcaagtggagatatggaccgctttgaggcctatggtagtaaaggaaatagcttcatataaaagctagacagcagcattctcagaaacttctttgtgatgcttgcattcaactcacagagttgaactttcctttcgagagagaagctttgaaacactctttttccagaatctgcaagtggacatttggagggctttgaggcctgtggtggaaaaggaattatcttcccgtaaaagctagatagaaagcattgtcagaaacttctttgtgatgattgcattcaagtcacagagttgaaggttccttttcaaagagcagtttccaatcactctttctgtggaatctgcaagtggatatttggacctctttgaagatttcgttggaaacgggagaatcttcacagaaaagctaaacagaagcattctcagaaacttctctgtgatgtttgtgttcaactcccagagtttcacattgcttctcatagagtagttctgaaacatgcttttcgtagtgtctgcaagtggacatttggagcgctttcaggcctgtggtggaaaacgaattatggtcacataaaaactggagagaagccttctcagaaacttctctgtgatgattgcattcaactcacagagttgaaccctcctatggatagagcagtgttgaaactctctttttgtttaatctgcaagcggatatgtggacctctccgaagacgtctttggaaacgggaatatcttcacataaaaactaaacagaagcattctcagaaacttcttggtgatgtttgcattcaaatcccagagttgaaccttcctttgagagttcaggtttgaaacactctttttgtaggatctgcaagtggatatttggaccactctgtggccttcgttcgaaacgggtacatcttcgcataaaatctagacagaagcattctcagaaaatactttgtgatgattgagttgaactcacagagctgaacattcctttggatggagcaggtttgagacacactttttgtagaatctacaagtggatatttggacctctctgaggatttcgttggaaacgggataactgcacctaactaaacggaagcattctcagaaactgctttgtgatgattgcattcacctcacagagttgaacattcctattgatagagcagtttggatacactcttgttgtggaatgtgcaagtggagatttggagcgctttgaggcctatggtagtaaagggaatagcttcatagaaaaactagacagatgtattctcaggaactttttggtgatgtttgtattcaactcccagagttgaactttcctttggaaagagcagctatgaaacactctttttctagaatctgcaagtggacgtttggagggctttgtggtttgtggtgtaaaaggaaatatcttcacctaaatactagatagaagcattctcagaagcttctctgtgatgactgcattcaactcacggagttgaacactccttttgagagcgtagttttgaaactctctttctgtggcatctgcaaggggacatgtagacctctttgaagatttcgttggaaacggaatcatcttcacataaaaactatacagaagcagtctcagaatcttctttgtgatgtttgcattcaaatcccagagttgaactttcctttcaaagttcacgtttgaaacactctttttgcaggatctacaagtggatatttggaccactctgtgtccttcgttcgaaacgggtatatcttcacacgacatctagacagaagctttctcagaaaattctttgggatgattgagtggaactcacagagctgaacattccttgcgatgtagcagtttagaaacacactttctgcagaatctgcaagtgcatatttggacctctctgaggaattcgttggaaacgggataatttcagctgactaaacagaagcattctcagaaccttcttcgtgatgtctgcattcaactcacagtgtggaacctttctttgatagttcaggtttgaaacactctttttgtagaaactgcaaggggataattgcacttctttgaggcctaccgtagtaaaggaaataacttcctatagaaagaagacagaagcattctcagaaccctcttcgtgatgtttgcattcaactcacagtgctgaacctttctttgatagttcagctttgaaacactcttcttgtagaaactgcaagtggatatttggtcctctctgaggatttcgttggaaacgggataaaccgcacagaactaaacagaagcattctcagagccctcttcgtgatgtttgcattcaactcacagtgctgaacctttctttgatagtgcagctttgaaacactctttttgtagaaactgcaagtggatgtttggtcctctctgaggatttcgttggaaacgggataaaccgcacagaactaaaacagaagcattgtcagaaacttctttgtgatgattgcattcaactcacagagttgaaggttccttttcaaacagcagtttccaatcactctttctgtggaatctgcaagtggatatttgggcctctctgaggatttcgttggaaacgggataaaacgcacagaactaaaacagaagcattctcagaaacttctctgtgatgtttgtgttcaactcccagagtttcacgttgcttttcatagagtagttctgaaacatgcttttcgtagtgtctgcaagtgtacatttggagcgctttcaggcctgtggtggaaaacgaattatggtcacataaaaactggagagaaaccttctcagaaacttctctgtgatgattgcattcaactcacggagttgaaccctcctatggatagagcagtgttgaaactctctttttgtggaatctgcaagtggatatgtggacctctccgaagatgtctttggaaacgggaatatcttcacatgaaaactaaacagaagcattctcagaaacttcttggtgatgtttgcattcaaatcccagagttgaaccttcctttgatagttcaggtttgaaacactctttctgtaggatctgcaagtggctatttggaccactctgtggccttcgttcgaaacgggtatatcttcgcataaaatctagacagaagcattctcagaaaatactttgtgatgattgagtttaaatcacagagctgaccattcctttggatggagcaggtttgagacacactttttgtagaatctacaagtggatatttggacctctctgaggatttcgttggaaacggggtaactgcacctaactaaacggaagcattctcagaaactgctttgtgatgattgcattcacctcacagagttgaacattcctattgatagagcagtttggaaacactcttgttgcggaatgtgcaagtggagatttggagcgctttgaggcctgtggtagtaaagggaatagcttcatagaaaaactagacagatgcattctcaggaactttttggtgatgtttgtattcaactcccagagttgaactttcctttggaaagagcagctatgaaacactctttttctagaatctgcaagtggacgtttggagggctttgtggtttgtggtggaaaaggaaatatcttcacctaaatactagatagaagcattctcagaagcttctctgtgatgactgcattcaactcacggagttgaacactccttttgagagcgcagttttgaaactctctttctgtggcatctgcaaggggacatgtagacctctttgaagatttcgttggaaacggaatcatcttcacataaaaactatacagaagcagtctcagaatcttctttgtgatgtttgcattcaaatcccagagttgaactttcgtttcaaatttcacgtttgaaacactctttttgcaggatctacaagtggatatttggaccactctgtgtccttcgttcgaaacgggtatatcttcacatgacatctagacagaagctttctcagaaaattctttgcgatgattgagttgaactcacagagctgagcattccttgcgatgtagcagtttagaaacacactttctgcagaatctgcaagtgcatatttggacctctgtgaggaattcgttggaaacgggataatttcagctgactaaacagaagcattctcagaaccttcttcgtgatgtctgcattcaacacaaagtgtggaacctttctttgatagttcaggttttaaaaactctttttgtagaaactgcaaggggataattgcactctttgaggagtaccgtagtaaaggaaataacttcctataaaaagaagacagaagcattctcagaaccctcttcgtgatgtttgcattcaactcacagtgctgaacctttctttgatagttcagctttgaaacactctttttgtagaaactgcaagtgaatatttggtcctctctgaggatttcgttggaaacaggataaaacgcacagaactaaacagaagcattctcagaaccttcttcgtgatgtttgcattcaactcacagtgttgaacctttctttgatagttcaggtttgaaacggtctttctgtagaaactgcaagtagatatttggaccactttgaggatttcgttggaaacgggataaaccgcacagaactaaaacagaagcattcacagaaaactcttggtgacgactgagtttaactcacagagctgaacattcctttggatggagcagtttcgaaacacactatttgtagaatgtgcaagtggatatttgggcctctctgaggatttcgttggaaacgggataaaccgcacagaactaaacagaagcattctcagaaactactttgtgatgattgcattcaagtcacagagttgaacattccctttgacagagcagtttggaaactctctttgtgtagaatctgcaagtggagatatggaccgctttgaggcctatggtagtaaaggaaatagcttcatataaaagctagacagtagcattctcagaaacttctttgtgatgcttgcattcaactcacagagttgaactttcctttcgagagagaagctttgaaacactctttttccagaatctgcaagtggacatttggagggctttgaggcctgtggtggaaaaggaattatcttcccgtaaaagctagatagaagcattgtcagaaacttctttgtgatgattgcattcaactcacagagttgaaggttccttttcaaagagcagtttccaatcactctttgtgtggaatctgcaagtggatatttggacctattttgaagatttcgttggaaacgggagaatcttcacaggaaagctaaacagaagcattctcagaaacttctctgtgatgtttgtgttcaactcccagagtttcacattgcttctcatagagtagttctgaaacatgcttttcgtagtgtctgcaagtggacatttggagcgctttcaggcctgtggtggaaaacggattatggtcacataaaaactggagagaagccttctcagaaacttctctgtgatgattgcattcaactcacagagttgaaccctcctatagatagagcagtgttgaaactctctttttgtggaatctgcaagtggatatgtggacctctccgaagatgtctttggaaacgggaatatcttcacataaaaactaaacagaagcattctcagaaacttcttcgtgatgtttgcattcaaatcccagagttgaaccttcctttgagagttcaggtttgaaacactctttttgtaggatctgcaagtggatatttggaccactctgtggccttcgttcgaaacgggtacatcttcgcataaaatctagacagaagcattctcagaaaatactttgtgatgattgagtttaactcacagagctgaacattcctttggatggagcaggtttgagacacaccttttgtagaatctacaagtggatatttggacctctctgaggatttcgttggaaacgggataactgcacctaactaaacggaagcattctcagaaactgctttgtgatgattgcattcacctcacagagttgaacattcctattgatagagcagtttggaaacactcttgttgtggaatgtgcaagtggagatttggagcgctttgaggcctatggtagtaaagggaatagcttcatagaaaaactagacagatgcattctcaggaactttttggtgatgtttgtattcaactcccagagttgaactttcctttggaaagatcagctatgaaacactctttttctagaatctgcaagtggacgtttggagggctttgtggtttgtggtggaaaaggaaatatcttcacctaaatactagatagaagcattctcagaagcttctctgtgatgactgcattcaactcacggagttgaacactccttttgagagcgcagttttgaaactctctttctgtggcatccgcaaggggacatgtagacctctttgaagatttcgttggaaacggaatcatcttcacataaaaactatacagaagcagtctcagaatcttctttgtgatgtttgcattcaaatcccagagttgaactttcctttcaaagttcacgtttgaaacactctttttgcaggatctacaagtggatatttggaccactctgtgtccttcgttcgaaacgggtatatcttcacatgacatctagacagaagctttctcagaaaattctttgggatgattgagtggaactcacagagctgaacattccttgcgatgtagcagtttagaaacacactttctgcagaatctgcaagtgcatatttggacctctctgaggaattcgttggaaacgggataatttcagctgactaaacagaagcattctcagaaccttcttcgtgatgtctgcattcaactcacagtgtggaacctttctttgatagttcaggtttgaaacactctttttgtagaaactgcaaggggataattgcacttctttgaggcctaccgtagtaaaggaaataacttcctatagaaagaagacagaagcattctcagaaccctcttcgtgatgtttgcattcaactcacagtgctgaacctttctttgatagttcagctttgaaacactcttcttgtagaaactgcaagtggatatttggtcctctctgaggatttcgttggaaacgggataaaccgcacagaactaaacagaagaattctcagagccctcttcgtgatgtttgcattcaactcacagtgctgaacctttctttgatagtgcagctttgaaacactctttttgtagaaactgcaagtggatgtttggtcctctctgaggatttcgttggaaacgggataaaccgcacagaactaaaacagaagcattgtcagaaacttctttgtgatgattgcattcaactcacagagttgaaggttccttttcaaacagcagtttccaatcactctttctgtggaatctgcaagtggatatttgggcctctctgaggatttcgttggaaacgggataaaacgcacagaactaaaacagaagcattctcagaaacttctctgtgatgtttgtgttcaactcccagagtttcacgttgcttttcatagagtagttctgaaacatgcttttcgtagtgtctgcaagtggacatttggagcgctttcaggcctgtggtggaaaacgaattatggtcacataaaaactggagagaagccttctcagaaacttctctgtgatgattgcattcaactcacagagttgaaccctcctatggatagagcagtgttgaaactctctttttgtggaatctgcaagtggatatgtggacctctccgaagatgtctttggaaacgggaatatcttcacataaaaactaaacagaagcattctcagaaacttcttggtgatgtttgcattcaaatcccagagttgaaccttcctttgatagttcaggtttgaaacactctttctgtaggatctgcaagtggctatttggaccactctgtggccttcgttcgaaacgggtatatcttcgcataaaatctagacagaagcattctcagaaaatactttgtgatgattgagtttaaatcacagagctgaccattcctttggatggagcaggtttgagacacactttttgtagaatctacaagtggatatttggacctctctgaggatttcgttggaaacgggataactgcacctaactaaacggaagcattctcagaaactgctttgtgatgattgcattcacctcacagagttgaacattcctattgatagagcagtttggaaacactcttgttgtggaatgtgcaagtggagatttggagcgctttgaggcctatggtagtaaagggaatagcttcatagaaaaactagacagatgcattctcaggaactttttggtgatgtttgtattcaactcccagagttgaactttcctttggaaagagcagctatgaaacactctttttctagaatctgcaagtggacgtttggagggctttgtggtttgtggtggaaaaggaaatatcttcacctaaatactagatagaagcatcctcagaagcttctctgtgatgactgcattcaactcacggagttgaacactccttttgagagcgcagttttgaaactgtctttctgtggcatctgcaaggggacatgtagacctctttgaagatttcgttggaaacggaatcatcttcacataaaaactatacagaagcagtctcagaatcttctttgtgatgtttgcattcaaatccccgagttgaactttcctttcaaagttcacgtttgaaacactctttttgcaggatctacaagtggatatttggaccactctgtgtccttcgttcgaaacgggtatatcttcacatgacatctagacagaagctttctcagaaaattctttgggatgattgagttgaactcacagagctgagcattccttgcgatgtagcagtttagaaacacactttctgcagaatctgcaagtgcatatttggacctctgtgaggaattcgttggaaacgggataatttcagctgactaaacagaagcattctcagaaccttcttcgtgatgtctgcattcaactcacagtgtggaacctttctttgatagttcaggtttgaaacactctttctgtagaaactgcaaggggataattgcactctttgaggagtaccgtagtaaaggaaataacttcctataaaaagaagacagaagcattctcagtaaccctcttcgtgatgtttgcattcaactcacagtgctgaacctttctttgatagttcagctttgaaacactctttttgtagaaactgcaagtggatatttggtcctctctgaggatttcgttggaaacgggataaactgcacagaactaaacagaagcattctcagaaccttcttcgtgatgtttgcattcaactcacagtgttgaacctttctttgatagttcaggtttgaaacggtctttctgtagaaactgcaagtagatatttggacctctctgaggatttcgttggaaacgggataaaccgcacacaactaaaacagaagcattcacagaaaactcttggtgacgactgagtttaactcacagagctgaacattcctttggatggagcagtttcgaaacacactatttctagaaggtgcaagtggatatgtgggcctctctgatgatttcgttggaaacgggataaaccgcacagaactaaacagaagcattctcagaaactactttgtgatgattgcattcaagtcacagagttgaacattccctttgacagagcagtttggaaactctctttgtgtagaatctgcaagtggagatatggaccgctttgaggcctatggtagtaaaggaaatagcttcatataaaagctagacagtagcattcccagaaacttctttgtgatgcttgcattcaactcacagagttgaactttcctttcgagagagaagctttgaaacactctttttccagaatctgcaagtggacatttggagggctttgaggcctgtggtggaaaaggaattatcttcccgtaaaagctagatagaagcattgtcagaaacttctttgtgatgattgcattcaactcacagagttgaaggttccttttcaaacagcagtttccaatcactctttctgtggaatctgcaagtggatatttgggcctctctgaggatttcgttggaaacgggataaaacgcacagaactaaaacagaagcattctcagaaacttctctgtgatgtttgtgttcaactcccagagtttcacgttgcttttcatagagtagttctgaaacatgcttttcgtagtgtctgcaagtggacatttggagcgctttcaggcctgtggtggaaaacgaattatggtcacataaaaactggagagaagccttctcagaaacttctctgtgatgattgcattcaactcacagagttgaaccctcctatggatagagcagtgttgaaactctctttttgtggaatctgcaagtggatatgtggacctctccgaagatgtctttggaaacgggaatatcttcacataaaaactaaacagaagcattctcagaaacttcttggtgatgtttgcattcaaatcccagagttgaaccttcctttgatagttcaggtttgaaacactctttctgtaggatctgcaagtggctatttggaccactctgtggccttcgttcgaaacgggtatatcttcgcataaaatctagacagaagcattctcagaaaatactttgtgatgattgagtttaaatcacagagctgaccattcctttggatggagcaggtttgagacacactttttgtagaatctacaagtggatatttggacctctctgaggatttcgttggaaacgggataactgcacctaactaaacggaagcattctcagaaactgctttgtgatgattgcattcacctcacagagttgaacattcctattgatagagcagtttggaaacactcttgttgtggaatgtgcaagtggagatttggagcgctttgaggcctatggtagtaaagggaatagcttcatagaaaaactagacagatgcattctcaggaactttttggtgatgtttgtattcaactcccagagttgaactttcctttggaaagagcagctatgaaacactctttttctagaatctgcaagtggacgtttggagggctttgtggtttgtggtggaaaaggaaatatcttcacctaaatactagatagaagcattctcagaagcttctctgtgatgactgcattcaactcacggagttgaacactccttttgagagcgcagttttgaaactctctttctgtggcatctgcaaggggacatgtagacctctttgaagattttgttggaaacggaatcatcttcacataaaaactatacagaagcagtctcagaatcttctttgtgatgtttgcattcaaatcccagagttgaactttcctttcaaagttcacgtttgaaacactctttttgcaggatctaaaagtggatatttgtaccactctgtgtccttcgttcgaaacgggtatatcttcacatgacatctagacagaagctttctcagaaaattctttgggatgatttagtggaactcacagagctgaacattccttgcgatgtagcagtttagaaacacactttctgcagaatctgcaagtgcatatttggacctctctgaggaattcgttggaaacgggataatttcagctgactaaacagaagcattctcagaaccttcttcgtgatgtctgcattcaactcacagtgtggaacctttctttgatagttcaggtttgaaacactctttttgtagaaactgcaaggggataattgcactctttgaggagtacccgtagtaaaggaaataacttcctataaaaagaagacagaagcattctcagaaccctcttcgtgatgtttgcattcaactcacagtgctgaacctttctttgatagttcagctttgaaacactctttttgtagaaactgcaagtggatatttggtcctctctgaggatttcgttggaaacgggataaactgcacagaactaaacagaagcattctcagaaccttcttcgtgatgtttgcattcaactcacagtgttgaacctttctttgatagttcaggtttgaaacggtctttctgtagaaactgcaagtagatatttggacctctctgaggatttcgttggaaacgggataacccgcacagaactaaaacagaagcattcacagaaaactcttggtgacgactgagtttaactcacagagctgaacattcctttggatggagcagtttcgaaacacactatttgtagaatgtgcaagtggatatttaggcctctctgaggatttcgttggaaacgggataaaccgcacagaactaaacagaagcattctcagaaactactttgtgatgattgcattcaagtcacagagttgaacattccctttgacagagcagtttggaaactctctttgtgtagaatctgcaagtggagatatggaccgctttgaggcctatggtagtaaaggaaatagcttcatataaaagctagacagtagcattctcagaaacttctttgtgatgcttgcattcaactcacagagttgaactttcctttcgagagagaagctttgaaacactctttttccagaatctgcaagtggacatttggagggctttgaggcctgtggtggaaaaggaattatcttcccgtaaaagctagatagaagcattgtcagaaacttctttgtgatgattgcattcaactcacagagttgaaggttccttttcaaagagcagtttccaatcactctttctgtggaatctgcaagtggatatttggacctattttgaagatttcgttggaaacgggagaatcttcacaggaaagctaaacagaagcattctcagaaacttctctgtgatgtttgtgttcaactcccagagtttcacattgcttttcatagagtagttctgaaacatgcttttcgtagtgtctacaagtggacatttggagcgctttcaggcctgtggtggaaaacgaattatggtcacataaaaactggagagaagccttctcagaaacttctctgtgctgattgcattcaactcacagagttgaaccctcctatggatagagcagtgttgaaactctctttttgtggaatctgcaagtggatatgtggacctctccaaagatgtctttggaaacgggaatatcttcacataaaaactaaacagaagcattctcagaaacttcttggtgatgtttgcattcaaatcccagtgttgaaccttcctttgatagttcaggtttgaaacactctttttgtaggatctgcaagtggatatttggaccactctgtggccttcgttcgaaacgggtatatcttcgcataaaatctagacagaagcattctcagaaaatactttgtgatgattgagtttaactcacagagctgaacattcctttggatggagcaggtttgagacacactttttgtagaatctacaagtggatatttggacctctctgaggatttcgttggaaacgggataactgcacctaactaaacggaagcattctcagaaactgctttgtgatgattgcattcacctcacagagttgaacattcctattgatagagcagtttggaaacactcttgttgtggaatgtgcaagtggagatttggagcgctttgaggcctatggtagtaaagggaatagcttcatagaaaaactagacagatgcattctcaggaactttttggtgacgtttgtattcaactcccagacttgaactttcctttggaaagagcagctatgaaacactctttttctagaatctgcaagtggacgtttggagggctttgtggtttgtggtggaaaaggaaatatcttcacctaaatactagatagaagcattctcagaagcttctctgtgatgactgcattcaactcacggagttgaacactccttttgagagcgcagttttgaaactctctttctgtggcatctgcaaggggacatgtagacctctttgaagatttcgttggaaacggaatcatcttcacataaaaactatacagaagcagtctcataatcttctttgtgatgtttgcattcaaatcccagagttgaactttcctttcaaagttcacgtttgaaacactctttttgcaggatctacaagtggatatttggaccactctgtgtctttcgttcgaaacgggtatatcttcacatgacatctagacagaagctttctcagaaaattctttgggatgattgagttgaactcacagagctgagcattccttgcgatgtagcagtttagaaacacactttctgcagaatctgcaagtgcatatgtggacctctctgaggaattcgttggaaacaggataatttcagctgactaaacagaagcattctcagaaccttcttcgtgatgtctgcattcaactcacagtgtggaacctttctttgatagttcaggtttgaaacactctttttgtagaaactgcaaggagataattgcacttctttgaggcctaacgtagtaaaggaaataacttcctataaaaagaagacagaagcattctcagaaccctcttcgtgatgtttgcattcaactcacactgctgaacctttctttgatagttcagctttgaaacactctttttgtagaaactgcaagtggatatttggtcctctctgaggatttcgttggaaaagggataaaccgcacagaactaaacagaagcattcacagaaaactcttggtgacgactgagtttaactcacagagctgaacattcctttggatggagcagttttgaaacacactatttgtagaatctgcaagtggatatttgggcctctctgaggatttaattggaaaagggataaaccgcacagaactaaaacagaagcattctcagaaactactttgtgatgattgcattcaagtcacagagctgaacattccctttgacagagcagtttggaaactctctttgtgtagaatctgcaagtggagatatggaatgctttgaggactatggtagtaaaggaaatagcttcatataaaagctagacagtagcattctcaggaacttctttgtgatgcttgcattcaactcacagagttgaagtttcctttcgagagagaagctttgaaacactctttttccagaatctgcaagtggacatttggagggctttgaggcctgtggtggaaaaggaattatcttcccgtaaaagctagatagaagcattgtcagaaacttctttgtgatgattgcattcaactcacagagttgaaggttccttttcaaacagcagtttccaaacaccctttctgtggaatctgcaagtggatgtttggacctcttggaagatttcgttggaaacgggagaatcttcacagaaaagctaaacagaagctttctcagaaacttctctgtgatgtttgtgttcaactcccagagtttcacattgcttttcattgagtagttctgaaacatgcttttcgtagtgtctgcaagtggacgtttggagcgctttcaggcctgtggtggaaaacgaattatggtcacataaaaactggagagaagccttctcagaaacttctctgtgatgattgcattcaactcacagagttgaaccctcctatggatagagcagtgttgaaactctctttttgtggaatctgcaagtggatatgtggacctctccgaagatgtctttggaaacgggaatatcttcacataaaaactaaacagaagcattctcagaaacttcttggtgatgtttgcattcaaatcccagagttgaaccttcctttgatagttcaggtttgaaacactctttttgtaggatctgcaagtggatatttggaccactctgtggccttcgttcgaaacgggtatatcttcgcataaaatctagacagaagcattctcagaaaatactttgtgatgattgagtttaactcacagagctgaacattcctttggatggagcaggtttgagacacaccttttgtagaatctacaagtggatatttggacctctctgaggatttcgttggaaacgggataactgcacctaactaaacggaagcattctcagaaactgctttgtgatgattgcattcacctcacagagttgaacattcctattgatagagcagtttggaaacactcttgttgtggaatgtgcaagtggagatttggagcgctttgaggtctatggtagtaaagggaatagcttcatagaaaaactagacagatgcattctcaggtaactttttggtgatgtttgtattcaactcccagagttgaactttcctttggaaagagcagctatgaaacactctttttctagaatctgcaagtggacgtttggagggctttgtggtttgtggtggaaaaggaaatatcttcacctaaatactagatagaagcattctcagaagcttctctgtgatgactgcattcaactcacggagttgaacactccttttgagagcgcagttttgaaactctctttctgtggcatctgcaaggggacatgtagacctctttgaagatttcgttggaaacggaatcatctaacacataaaaactatacagaagcagtctcagaatcttctttgtgatgtttgcattcaaatcccagagttgaactttcctttcaaagttcacgtttgaaacactctttttgcaggatctacaagtggatatttggactactctgtgtccttcgttcgaaaagggtatatcttcacatgacatctagacagaagctttctcagaaaattctttgggatgattgagttgaactcacggagctgaacattccttgcgatgtagcagtttagaaacacactttctgcagaatctgcaagtgcatatttggacctctctgaggaattcgttggaaacaggataatttcagctgactaaacagaagcattctcagaaccttcttcatgatgtctgcattcaactcacagtgtggaacctttctttgatagttcaggtttgaaacactctttttgtagaaactgcaaggggataattgcacttctttgaggcctaccgtagtaaaggaaataacttcctataaaaagaagacagaagcattctcagaaccctcttcgtgatgtttgcattcatctcacagtgctgaacctttctttgatagttcagctttgaaacactcttcttgtagaaactgcaagtggatatttggtcctctctgaggatttcgttggaaacgggataaaccgcacagaattaaacagaagcattcacagaaaactcttggtgacgactgagtttaactcacagagctgaacattcctttggatggagcagtttcgaaacacactatttgtagaatgtgcaagtggatatttgggcctctctgaggatttcgttggaaacgggataaaccgcacagaactaaaacagaagcattctcagaaactactttgtgatgattgcattcaagtcacagagttgaacattccctttgacagagcagtttggaaactctctttgtgtagaatctgcaagtggagatatggaccgctttgaggcctatggtagtaaaggaaatagcttcatataaaagcttgacagtagcattctcagaaacttctttgtgatgcttgcattcaactcacagagttgaacttccctttcgagagagaagctttgaaacactctttttccagaatgtgcaagtggacatttggagggctttgaggcctgtggtggaaaaggagttatcttcccgtaaaagctagatagaagcattgtcagaaacttctttgtgatgattgcattcaactcacagagttgaaggttccttttcaaacagcagtttccaatcactctttctgtggaatctgcaagtggatatttcgacctctttgaagatttcgttggaaaagggagaatcttcacagaaaagctaaacagaagcattctcagaaacttctctgtgatgtttgtgttcaactcccagagtttcacgttgcttttcatagagtagttttgaaacatgcttttcgtagtgtctgcaagtggacatttggagcgctttcaggcctgtggtggaaaacgaattatggtcacatgaaaactggagagaagccttctcagaaacttctctgtgatgattgcattcaactcacagagttgaaccctcctatggatagagcagtgttgaaactctctttttgtggaatctgcaagtggatatgtggacctctccgaagatgtctttggaaacgggaatatcttcacataaaaactaaacagaagcattctcagaaacttcttggtgatgtttgcattcaaatcccagagttgaaccttcctttgatagttcaggtttgaaacactctttttgtaggatctgcaagtggctatttggaccactctgtggccttcgttcgaaacgggtatatcttcgcataaaatctagacagaagcattctcagaaaatactttgtgatgattgagtttaaatcacagagctgaacattcctttggatagagcaggtttgagacacactttttgtagaatctacaagtggatatttggacctctctgaggatttcgttggaaacgggataactgcacctaactaaacggaagcattctcagaaactgctttgtgatgattgcattcacctcacagagttgaacattcctattgatagagcagtttggaaacactcttgttgtggaatgtgcaagtggagatttggagcgctttgaggcctgtggtagtaaagggaatagcttcatagaaaaactagacagatgcattctcaggaactttttggtgatgtttgtattcaactcccagagttgaactttcctttggaaagagcagctatgaaacactctttttctagaatctgcaagtggacgtttggagggctttgtggtttgtggtggaaaaggaaatatcttcacctaaatactagatagaagcatcctcagaagcttctctgtgatgactgcattcaactcatggagttgaacactccttttgagagcgcagttttgaaactctctttctgtggcatctgcaaggggacatgtagacctctttgaagatttcgttggaaacggaatcatcttcacataaaaactacacagaagcagtctcagaatcttctttgtgatgtttgcattcaaatccccgagttgaactttcctttcaaagttcacgtttgaaacactctttttgcaggatctacaagtggatatttggaccactctgtgtccttcgttcgaaacgggtatatcttcacatgacatctagacagaagctttctcagaaaattctttgggatgattgagttgaactcacagagctgagcattccttgcgatgtagcagtttagaaacacactttctgcagaatctgcaagtgcatatttggacctctgtgaggaattcgttggaaacgggataatttcagctgactaaacagaagcattctcagaaccttcttcgtgatgtctgcattcaactcacagtgtggaacctttctttgatagttcaggtttgaaacactctttttgtagaaactgcaaggggataattgcactctttgaggagtaccgtagtaaaggaaataacttcctataaaaagaagacagaagcattctcagaaccctcttcgtgatgtttgcattcaactcacagtgctgaacctttctttgatagttcagctttgaaacactctttttgtggaaactgcaagtggatatttggtcctctctgaggatttcgttggaaacgggataaactgcacagaactaaacagaagcattctcagaaccttcttcgtgatgtttgcattcaactcacagtgttgaacctttctttgatagttcaggtttgaaacggtctttctgtagaaactgcaagtagatatttggacctctctgaggatttcgttggaaacgggataacccgcacagaactaaaacagaagcattcacagaaaactcttggtgacgactgagtttaactcacagagctgaacattcctttggatggagcagtttcgaaacacactatttgtagaatgtgcaagtggatatttaggcctctctgaggatttcgttggaaacgggataaaccgcacagaactaaacagaagcattctcagaaactactttgtgatgattgcattcaagtcacagagttgaacattccctttgacagagcagtttggaaactctctttgtgtagaatctgcaagtggagatatggaccgctttgaggcctatggtagtaaaggaaatagcttcatataaaagctagacagtagcattctcagaaacttctttgtgatgcttgcattcaactcacagagttgaactttcctttcgagagagaagctttgaaacactctttttccagaatctgcaagtggacatttggagggctttgaggcctgtggtggaaaaggaattatcttcccgtaaaagctagatagaagcattgtcagaaacttctttgtgatgattgcattcaagtcacagagttgaaggttccttttcaaagagcagtttcaatcactctttctgtggaatctgcaagtggatatttggacctctttgaagatttcgttggaaacgggagaatcttcacagaaaagctaaacagaagcattctcagaaacttctctgtgatgtttgtgttcaactcccggagtttcacattgcttctcatagagtagttctgaaacatgcttttcgtagtgtctgcaagtggacatttggagcgctttcaggcctgtggtggaaaacgaattatggtcacataaaaactggagagaagccttctcagaaacttctctgtgatgattgcattcaactcacagagttgaaccctcctatggatagagcagtgttgaaactctctttttgtggaatctgcaagcggatatgtggacctctccgaagatgtctttggcaacgggaatatcttcacataaaaactaaacagaagcattctcagaaacttcttggtgatgtttgcattcaaatcccagagttgaaccttcctttcatagttcaggtttgcaacactctttttgtaggatctgcaagtggatatttggaccactctgtggccttcgttcgaaacgggtacatcttcgcataaaatctagacagaagcattctcagaaaatactttttgatgactgagttgaactcacagagctgaacattcctttggatggagcaggtttgagacacactttttgtagaatctacaagtggatatttggacctctctgaggatttcgttggaaacgggataactgcacctaactaaacggaagcattctcagaaactgctttgtcatgattgcattcacctcacagagttgaacattcctattgatagagcagtttggaaacactcttgttgtggaatgtgcaagtggagatttggagcgctttgaggcctatggtagtaaagggaatagcttcatagaaaaactagacagatgcattctcaggaactttttggtgatgtttgtattcaactcccagagttgaactttcctttggaaagagcagctatgaaacactctttttctagaatctgcaagtggacgtttgtagggctttgtggtttgtggtggaaaaggaaatatcttcacctaaatactagatagaagcattctcagaagcttctctgtgatgactgcattcagctcacggagttgaacactccttttgagagcgcagttttgaaactctctttctgtggcatctgcaaggggacatgtagacctctttgaagatttcgttggaaacggaatcatcttcacataaaaactatacagaagcagtcccagaatcttctttgtgatgtttgcattcaaatcccagagttgaactttcctttccaagttcacgtttgaaacactctttttgcaggatctacaagtcgatatttggaccactctgcgtccttcgttcgaaacgggtatatcttcacatgacatctagactgaagctttctcagaaaattctttgggatgattgagttgagcaaacagagctgaacactccttgcgatgtagcagtttagaaacacactttctgcagaatctgcaagtgcatatgtggacctctctgaggaattcgttggaaatgggataatttcagctgactaaacagaagcattctcagaaccttcttcgtgatgtctgcattcaactcacagtgtggaacctttctttgatagttcaggtttgaaacactctttttgtagaaactgcaaggggatcattgcacttctttgaggcctaccgtagtaaaggagataagttcctataaaaagaagacagaagcattctcagaacactcttcgtgatgtttgcattcaactcacggtgctgaacctttctttgatagttcagctttgaaacactctttttgtagaaactgcaagtggatatttggtcctctctgaggatttcgttggaaacgggataaaccgcacagaactaaacagaagcattctcagaaccttcttcgtgatgtttgcattcaactcacagtgttgaacctttctttgatagttcaggtttgaaacggtctttctgtagaaactgcaagtagatatttggacctctctgaggatttcgttggaaacgggataaaccgcacacaactaaaacagaagcattcacagaaaactcttggtgacgactgagtttaactcacagagctgaacattcctttggatggagcagtttcgaaacacactatttgtagaatgtgcaagtggatatgtgggcctctctgaggatttcgttggaaacgggataaaccgcacagaactaaacagaagcattctcagaaactactttgtgatgattgcattcaagtcacagagttgaacattccctttgacagagcagtttggaaactctctttgtgtagaatctgcaagtggagatatggaccgctttgaggcctatggtagtaaaggaaatagcttcatataaaagctagacagtagcatcctcagaaacttctttgtgatgcttgcattcaactcacagagttgaactttcctttcgagagagaagctttgaaacactctttttccagaatctgcaagtggacatttggagggctttgaggcctgtggtggaaaaggaattatcttcccgtaaaagctagatagaagcattgtcagaaacttctttgtgatgattgcattcaagtcacagagttgaaggttccttttcaaagagcagtttccaatcactctttctgtggaatctgcaagtggatatttggacctctttgaagatttcgttggaaacgggagaatcttcacagaaaagctaaacagaagcattctcagaaacttctctgtgatgtttttgttcaactcccagagtttcacattgcttctcatagagtagttctgaaacatgcttttcgtagtgtctgcaagtggacatttggagcgctttcaggtctgtggtggaaaacgaattatggtcacataaaaactggagagaagccttctcagaaacttctctgtgatgattgcattcaactcacagagttgaaccctcctatggatagagcagtgttgaaactctctttttgtggaatctgcaagcggatatgtggacctctccgaagatgtctttggcaacgggaatatcttcacataaaaactaaacagaagcattctcagaatcttcttggtgatgtttgcattcaaatcccagagttgaaccttcctttgagagttcaggtttgaaacactctttttgtaggatctgcaagtggatatttggaccactctgtggccttctttcgaaacgggtacatcttcgcataaaatctagacagaagcattctcagaaaatactttgtgatgattgagttgaactcacagagctgaacattcctttggatggagcaggtttgagacacactttttgtagaatctacaagtggatatttggacctctctgaggatttcgttggaaacgggataactgcacctaactaaacggaagcattctcagaaactgctttgtgatgattgcattcacctcacagagttgaacattcctattgatagagcagtttggaaacactcttcttgtggaatgtacaagtggagatttggagcgctttgaggcctatggtagtaaagggaatagcttcatagaaaaactagacagatgcattctcaggaactttttggtgatgtttgtattcaactcccagagttgaactttcctttggaaagagcagctatgaaacactctttttctagaatctgcaagtggacgtttggagggctatgtggtttgtggtggaaaaggaaatattttcaactaaatactagataggagcattctcagaagcttctctgtgatgactgcattcaactcacggagttgaacactccttttgagagcgcagttttgaaactctctttctgtggcatctgcaaggggacatgtagacctctttgaagatttcgttggaaacggaatcatcttcacataaaaactatacagaagcagtctcagaatcttctttgtgatgtttgcattcaaatcccagagttgaactttcctttcaaagttcacgtttgaaacactctttttgcaggatctacaagtggatatttggaccactctgtgtccttcgttcgaaacgggtatatcttcacacgacatctagacagaagctttctcagaaaattctttgggatgattgagtggaactcacagagctgaacattccttgcgatgtagcagtttagaaacacactttctgcagaatctgcaagtgcatatttggacctctctgaggaattcgttggaaacgggataatttcagctgactaaacagaagcattctcagaaccttcttcgtgatgtctgcattcaactcacagtgtggaacctttctttgatagttcaggtttgaaacactctttttgtagaaactgcaaggggataattgcacttctttgaggcctaccgtagtaaaggaaataacttcctatagaaagaagacagaagcattctcagaaccctcttcgtgatgtttgcattcaactcacagtgctgaacctttctttgatagttcagctttgaaacactcttcttgtagaaactgcaagtggatatttggtcctctctgaggatttcgttggaaacgggataaaccgcacagaactaaacagaagaattctcagagccctcttcgtgatgtttgcattcaactcacagtgctgaacctttctttgatagtgcagctttgaaacactctttttgtagaaactgcaagtggatgtttggtcctctctgaggatttcgttggaaacgggataaaccgcacagaactaaaacagaagcattgtcagaaacttctttgtgatgattgcattcaactcacagagttgaaggttccttttcaaacagcagtttccaatcactctttctgtggaatctgcaagtggatatttgggcctctctgaggatttcgttggaaacgggataaaacgcacagaactaaaacagaagcattctcagaaacttctctgtgatgtttgtgttcaactcccagagtttcacgttgcttttcatagagtagttctgaaacatgcttttcgtagtgtctgcaagtggacatttggagcgctttcaggcctgtggtggaaaacgaattatggtcacataaaaactggagagaagccttctcagaaacttctctgtgatgattgcattcaactcacagagttgaaccctcctatggatagagcagtgttgaaactctctttttgtggaatctgcaagtggatatgtggacctctccgaagatgtctttggaaacgggaatatcttcacataaaaactaaacagaagcattctcagaaacttcttggtgatgtttgcattcaaatcccagagttgaaccttcctttgatagttcaggtttgaaacactctttctgtaggatctgcaagtggctatttggaccactctgtggccttcgttcgaaacgggtatatcttcgcataaaatctagacagaagcattctcagaaaatactttgtgatgattgagtttaaatcacagagctgaccattcctttggatggagcaggtttgagacacactttttgtagaatctacaagtggatatttggacctctctgaggatttcgttggaaacgggataactgcacctaactaaacggaagcattctcagaaactgctttgtgatgattgcattcacctcacagagttgaacattcctattgatagagcagtttggaaacactcttgttgtggaatgtgcaagtggagatttggagcgctttgaggcctatggtagtaaagggaatagcttcatagaaaaactagacagatgcattctcaggaactttttggtgatgtttgtattcaactcccaagagttgaactttcctttggaaagagcagctatgaaacactctttttctagaatctgcaagtggacgtttggagggctttgtggtttgtggtggaaaaggaaatatcttcacctaaatactagatagaagcattctcagaagcttctctgtgatgactgcattcaactcacggagttgaacactccttttgagagcgcagttttgaaactctctttctgtggcatccgcaaggggacatgtagacctgtttgaagatttctttggaaagggaatcatcttcacataaaaactatacagaagcagtctcagaatcttctttgtgatgtttgcattcaaatcccagagttgaactttcctttcaaagttcacgtttgaaacactctttttgcaggatctacaagtggatatttggaccactctgtgtccttcgttcgaaacgggtatatcttcacatgacatctagacagaagctttctcagaaaattctttgggatgattgagttgagcaaacagagctgaacactccttgcgatgtagcagtttagaaacacactttctgcagaatctgcaagtgcatatgtggacctctctgaggaattcgttggaaacgggataatttcagctgactaaacagaagcattctcagaaccttcttcgtgatgtctgcattcaactcacagtgtggaacatttctttgatagttcaggtttgaatcactctttttgtagaaactgcaaggggataattgcacttctttgaggcctaccgtagtaaaggagataacttcctataaaaagaagacagaagcattctcagaaccctcttcgtgatgtttccattcaactcacagtgctgaacctttctttgatagttcagctttgaaacactcttcttgtagaaactgcaagtggatatttggtcctctctgaggatttcgttggaaacgggataaaccgcacagaactaaacagaagcattctcagaaccttcttcgtgatgtttgcattcaactcacagtgttgaacctttctttgatagttcaggtttgaaacggtctttctgtagaaactgcaagtagatatttggacctctctgaggatttcgttggaaacgggataacccgcacagaactaaaacagaagcattcacagaaaactcttggtgacgactgagtttaactcacagagctgaacatccctttggatggagcagtttcgaaaaacaatatttgtagaatgtgcaagtggatattggggcctctgtgaggatttcgttggaaacgggataaaccgcacagaactaaacagaagcattctcagaaactactttgtgatgattgcattcaagtcacagagttgaacattccctttgacagagcagtttggaaactctctttgtgtagaatctgcaagtggagatatggaccgctttgaggcctatggtaataaaggaaatagcttcatataaaagctagacagtagcattctcagaaacttctttgtgatgcttgcattcaactcacagagttgaactttcctttcgagagagaagctttgaaacactctttttccagaatctgcaagtggacatttggagggctttgaggcctgtggtggaaaaggaattatcttcccgtaaaagctagatagaagcattgtcagaaacttctttgtgatgattgcattcaactcacagagttgaagcttccttttcaaagagcagtttccaatcactctttctgtggaatctgcaagtggatatttggacctattttgaagatttcgttggaaacgggagaatcttcacagaaaagctaaacagaagcattctcagaaacttctctgtgatgtttgtgttcaactcccaagagtttcacattgcttttcatagagtagttctgaaacatgcttttcgtagtgtctacaagtggacatttggagcgctttcaggcctgtggtggaaaacgaattatggtcacataaaaactggagagaagccttctcagaaacttctctgtgatgattgcattcaactcacagagttgaaccctcctatggatagagcagtgttgaaactctctttttgtggaatctgcaagtggatatgtggacctctccgaagatgtctttggaaacgggaatatcttcacataaaaactaaacagaagcattctcagaaacttcttggtgatgtttgcattcaaatcccagagttgaaccttcctttgatagttcaggtttgaaacactctttctgtaggatctgcaagtggctatttggaccactctgtggccttcgttcgaaacgggtatatcttcgcataaaatctagacagaagcattctcagaaaatactttgtgatgattgagtttaaatcacagagctgaccattcctttggatggagcaggtttgagacacactttttgtagaatctacaagtggatatttggacctctctgaggatttcgttggaaacgggataactgcacctaactaaacggaagcattctcagaaactgctttgtgatgattgcattcacctcacagagttgaacattcctattgatagagcagtttggaaacactcttgttgtggaatgtgcaagtggagatttggagcgctttgaggcctgtggtagtaaagggaatagcttcatagaaaaactagacagatgcattctcaggaactttttggtgatgtttgtattcaactcccagagttgaactttcctttggaaagagcagctatgaaacactctttttctagaatctgcaagtggacgtttggagggctttgtggtttgtggtggaaaaggaaatatcttcacctaaatactagatagaagcattctcagaagcttctctgtgatgactgcattcaactcacggagttgaacactccttttgagagcgcagttttgaaactctctttctgtggcatctgcaaggggacatgtagacctctttgaagatttcgttggaaacggaatcatcttcacataaaaactatacagaagcagtctcagaatcttctttgtgatgtttgcattcaaatcccagagttgaactttcctttcaaagttcacgtttgaaacactctttttgcaggatctacaagtggatatttggaccactctgtgtccttcattcgaaacgggtatatcttcacatgacatctagacagaagctttctcagaaaattctttgggatgattgagtggaactcacagagctgaacattccttgcgatgtagcagtttagaaacacactttctgcagaatctgcaagtgcatatttggacctctctgaggaattcgttggaaacgggataatttcagctgactaaacagaagcattctcagaaccttcttcgtgatgtctgcattcaactcacagtgtggaacctttctttgatagttcaggtttgaaacactctttttgtagaaactgcaaggggataattgcacttctttgaggcctaccgtagtaaaggaaataacttcctatagaaagaagacagaagcattctcagaaccctcttcgtgatgtttgcattcaactcacagtgctgaacctttctttgatagttcagctttgaaacactcttcttgtagaaactgcaagtggatatttggtcctctctgaggatttcgttggaaacgggataaaccgcacagaactaaacagaagcattctcagagccctcttcgtgatgtttgcattcaactcacagtgctgaacctttctttgatagtgcagctttgaaacactctttttgtagaaactgcaagtggatgtttggtcctctctgaggatttcgttggaaacgggataaaccgcacagaactaaaacagaagcattgtcagaaacttctttgtgatgattgcattcaactcacagagttgaaggttccttttcaaacagcagtttccaatcactctttctgtggaatctgcaagtggatatttgggcctctctgaggatttcgttggaaacgggataaaacgcacagaactaaaacagaagcattctcagaaacttctctgtgatgtttgtgttcaactcccagagtttcacgttgcttttcatagagtagttctgaaacatgcttttcgtagtgtctgcaagtggacatttggagcgctttcaggcctgtggtggaaaacgaattatggtcacataaaaactggagagaagccttctcagaaacttctctgtgatgattgcattcaactcacagagttgaaccctcctatggatagagcagtgttgaaactctctttttgtggaatctgcaagtggatatgtggacctctccgaagatgtctttggaaacgggaatatcttcacataaaaactaaacagaagcattctcagaaacttcttggtgatgtttgcattcaaatcccagagttgaaccttcctttgatagttcaggtttgaaacactctttctgtaggatctgcaagtggctatttggaccactctgtggccttcgttcgaaacgggtatatcttcgcataaaatctagacagaagcattctcagaaaatactttgtgatgattgagtttaaatcacagagctgaccattcctttggatggagcaggtttgagacacactttttgtagaatctacaagtggatatttggacctctctgaggatttcgttggaaacgggataactgcacctaactaaacggaagcattctcagaaactgctttgtgatgattgcattcacctcacagagttgaacattcctattgatagagcagtttggaaacactcttgttgtggaatgtgcaagtggagatttggagcgctttgaggcctgtggtagtaaagggaatagcttcatagaaaaactagacagatgcattctcaggaactttttggtgatgtttgtattcaactcccagagttgaactttcctttggaaagagcagctatgaaacactctttttctagaatctgcaagtggacgtttggagggctttgtggtttgtggtggaaaaggaaatatcttcacctaaatactagatagaagcattctcagaagcttctctgtgatgactgcattcaactcacggagttgaacactccttttgagagcgcagttttgaaactctctttctgtggcatctgcaaggggacatgtagacctctttgaagatttcgttggaaacggaatcatcttcacataaaaactatacagaagcagtctcagaatcttctttgtgatgtttgcattcaaatcccagagttgaactttcctttcaaagttcacgtttgaaacactctttttgcaggatctacaagtggatatttggaccactctgtgtccttcgttcgaaacgggtatatcttcacacgacatctagacagaagctttctcagaaaattctttgggatgattgagtggaactcacagagctgaacattccttgcgatgtagcagtttagaaacacactttctgcagaatctgcaagtgcatatttggacctctctgaggaattcgttggaaacgggataatttcagctgactaaacagaagcattctcagaaccttcttcgtgatgtctgcattcaactcacagtgtggaacctttctttgatagttcaggtttgaaacactctttttgtagaaactgcaaggggataattgcacttctttgaggcctaccgtagtaaaggaaataacttcctatagaaagaagacagaagcattctcagaaccctcttcgtgatgtttgcattcaactcacagtgctgaacctttctttgatagttcagctttgaaacactcttcttgtagaaactgcaagtggatatttggtcctctctgaggatttcgttggaaacgggataaaccgcacagaactaaacagaagaattctcagagccctcttcgtgatgtttgcattcaactcacagtgctgaacctttctttgatagtgcagctttgaaacactctttttgtagaaactgcaagtggatgtttggtcctctctgaggatttcgttggaaacgggataaaccgcacagaactaaaacagaagcattgtcagaaacttctttgtgatgattgcattcaactcacagagttgaaggttccttttcaaacagcagtttccaatcactctttctgtggaatctgcaagtggatatttgggcctctctgaggatttcgttggaaacgggataaaacgcacagaactaaaacagaagcattctcagaaacttctctgtgatgtttgtgttcaactcccagagtttcacgttgcttttcatagagtagttctgaaacatgcttttcgtagtgtctgcaagtggacatttggagcgctttcaggcctgtggtggaaaacgaattatggtcacataaaaactggagagaagccttctcagaaacttctctgtgatgattgcattcaactcacagagttgaaccctcctatggatagagcagtgttgaaactctctttttgtggaatctgcaagtggatatgtggacctctccgaagatgtctttggaaacgggaatatcttcacataaaaactaaacagaagcattctcagaaacttcttggtgatgtttgcattcaaatcccagagttgaaccttcctttgatagttcaggtttgaaacactctttctgtaggatctgcaagtggctatttggaccactctgtggccttcgttcgaaacgggtatatcttcgcataaaatctagacagaagcattctcagaaaatactttgtgatgattgagtttaaatcacagagctgaccattcctttggatggagcaggtttgagacacactttttgtagaatctacaagtggatatttggacctctctgaggatttcgttggaaacgggataactgcacctaactaaacggaagcattctcagaaactgctttgtgatgattgcattcacctcacagagttgaacattcctattgatagagcagtttggaaacactcttgttgtggaatgtgcaagtggagatttggagcgctttgaggcctgtggtagtaaagggaatagcttcatagaaaaactagacagatgcattctcaggaactttttggtgatgtttgtattcaactcccagagttgaactttcctttggaaagagcagctatgaaacactctttttctagaatctgcaagtggacgtttggagggctttgtggtttgtggtggaaaaggaaatatcttcacctaaatactagatagaagcattctcagaagcttctctgtgatgactgcattcaactcacggagttgaacactccttttgagagcgcagttttgaaactctctttctgtggcatctgcaaggggacatgtagacctctttgaagatttcgttggaaacggaatcatcttcacataaaaactatacagaagcagtctcagaatcttctttgtgatgtttgcattcaaatcccagagttgaactttcctttcaaagttcacgtttgaaacactctttttgcaggatctacaagtggatatttggaccactctgtgtccttcgttcgaaacgggtatatcttcacacgacatctagacagaagctttctcagaaaattctttgggatgattgagtggaactcacagagctgaacattccttgcgatgtagcagtttagaaacacactttctgcagaatctgcaagtgcatatttggacctctctgaggaattcgttggaaacgggataatttcagctgactaaacagaagcattctcagaaccttcttcgtgatgtctgcattcaactcacagtgtggaacctttctttgatagttcaggtttgaaacactctttttgtagaaactgcaaggggataattgcacttctttgaggcctaccgtagtaaaggaaataacttcctgtagaaagaagacagaagcattctcagaaccctcttcgtgatgtttgcattcaactcacagtgctgaacctttctttgatagttcagctttgaaacactcttcttgtagaaactgcaagtggatatttggtcctctctgaggatttcgttggaaacgggataaaccgcacagaactaaacagaagaattctcagagccctcttcgtgatgtttgcattcaactcacagtgctgaacctttctttgatagtgcagctttgaaacactctttttgtagaaactgcaagtggatgtttggtcctctctgaggatttcgttggaaacgggataaaccgcacagaactaaaacagaagcattgtcagaaacttctttgtgatgattgcattcaactcacagagttgaaggttccttttcaaacagcagtttccaatcactctttctgtggaatctgcaagtggatatttgggcctctctgaggatttcgttggaaacgggataaaacgcacagaactaaaacagaagcattctcagaaacttctctgtgatgtttgtgttcaactcccagagtttcacgttgcttttcatagagtagttctgaaacatgcttttcgtagtgtctgcaagtggacatttggagcgctttcaggcctgtggtggaaaacgaattatggtcacataaaaactggagagaagccttctcagaaacttctctgtgatgattgcattcaactcacagagttgaaccctcctatggatagagcagtgttgaaactctctttttgtggaatctgcaagtggatatgtggacctctccgaagatgtctttggaaacgggaatatcttcacataaaaactaaacagaagcattctcagaaacttcttggtgatgtttgcattcaaatcccagagttgaaccttcctttgatagttcaggtttgaaacactctttctgtaggatctgcaagtggctatttggaccactctgtggccttcgttcgaaacgggtatatcttcgcataaaatctagacagaagcattctcagaaaatactttgtgatgattgagtttaaatcacagagctgaccattcctttggatggagcaggtttgagacacactttttgtagaatctacaagtggatatttggacctctctgaggatttcgttggaaacgggataactgcacctaactaaacggaagcattctcagaaactgctttgtgatgattgcattcacctcacagagttgaacattcctattgatagagcagtttggaaacactcttgttgtggaatgtgcaagtggagatttggagcgctttgaggtctatggtagtaaagggaatagcttcatagaaaaactagacagatgcattctcaggaaccttttggtgatgtttgtattcaactcccagagttgaactttcctttggaaagagcagctatgaaacactctttttctagaatctgcaagtggacgtttggagggctttgtggtttgtggtggaaaaggaaatatcttcacctaaatactagatagaagcattctcagaaagcttctctgtgatgactgcattcaactcacggagttgaacactccttttgagagcgcagttttgaaactctctttctgtggcatctgcaaggggacatgtagacctctttgaagatttcgttggaaacggaatcatcttcacataaaaagtatacagaagcagtctcagaatcttctttgtgatgtttgcattcaaatcccagaattgaactttcctttcaaagttcacgtttgaaacactctttttgcaggatctacaagtggatatttggaccactctgtgtccttcgttcgaaacgggtataaacttcacatgacatctagacagaagctttctcagaaaattctttgggatgattgagttgaactcacagagctgagcattccttgcgatgtagcagtttagaaacacactttctgcagaatctgcaagtgcatatttggacctctgtgaggaattcgttggaaacgggataatttcagctgactaaacagaagcattctcagaaccttcttcgtgatgtctgcattcaactcacagtgtggaacctttctttgatagttcaggtttgaaacactctttttgtagaaactgcaaggggataattgcactctttgaggagtaccgtagtaaaggaaataacttcctctaaaaagaagacagaagcattctcagaaccctcttcgtgatgtttgcattcaactcacagtgctgaacctttctttgatagttcagctttgaaacactctttttgtagaaactgcaagtggatatttggtcctctctgaggatttcgttggaaacgggataaactgcacagaactaaacagaagcattctcagaaccttcttcgtgatgtttgcattcaactcacagtgttgaacctttctttgatagttcaggtttgaaacggtctttctgtagaaactgcaagtagatatttggacctctctgaggatttcgttggaaacgggataaaccgcacagaactaaaacagaagcattcacagaaaactcttggtgacgactgagtttaactcacagagctgaacattcctttggatggagcagtttcgaaacacactatttgtagaatgtgcaagtggatatttgggcctctctgaggatttcgttggaaacgggataaaccgcacagaactaaacagaagcattctcagaaactactttgtgatgattgcattcaagtcacagagttgaacattccctttgacagagcagtttggaaactctctttctgtagaatctgcaagtggagatatggaccgctttgaggcctgtggtagtaaaggaaatagcttcatataaaagctagacagtagcattctcagaaacttctttgtgatgcttgcattcaactcacagagttgaactttcctttcgagagagaagctttgaaacactctttttccagaatctgcaagtggacatttggagggctttgaggcctgtggtagaaaaggaattaacttcccgtaaaagctagatagaagcattgtcagaaacttctttgtgatgattgcattcaactcacagagatgaaggttccttttcaaacagcagtttccaaacactctttctgtggaatctgcaagtggatatttggatctctttgaagatttcgttggaaacgggagaatcttcacagaaaagctaaacagaagcattctcagaaacttctctgtgatgtttgtgttcaactcccagagtttcacattgcttttcatagagtagttctgaaacatgcttttcgtagtgtctgcaagtggacatttggagcgctttcaggcctgtggtgcaaaacgaattatggtcccataaaaactggaaagaagccttcacagaaacttctctgtgatgattgcattcaactcacagatttgaaccctcctatggatagagcattgttgaaactctctttttgtggaatctgcaagtggatatgtggacctctctgaagatgtctttggaaacgggaatatcttcacataaaaactaaacagaagcattctcagaaacttcttggtgatgtttgcattcaaatcccagagttgaaccttcctttgatagttcaggtttgaaacactctttttgtaggatctgcaagtggatatttggaccactctgtggccttcgttcgaaacgggtatatcttcgcataaaatctagacagaagcattctcagaaaatactttgtgatgattgagtttaactcacagagctgaacattcctttggatggagcaggtttgagacacactttttgtagaatctacaagtggatatttggacctctctgaggatttcgttggaaacgggataactgcacctaactaaacggaagcattctcagaaactgctttgtgatgattgcattcacctcacagagttgaacattcctattgatagagcagtttggaaacactcttgttgtggaatgtgcaagtggagatttggagcgctttgaggcctatggtagtaaagggaatagcttcatagaaaaactagacagatgcattctcaggaactttttggtgatgtttgtattcaactcccagagttgaactttcctttggaaagagcagctatgaaacactctttttctagaatctgcaagtggacgtttggagggctttgtggtttgtggtggaaaaggaaatatcttcacctaaatactagatagaagcattctcagaagcttctctgtgatgactgcattcaactcacggagttgaacactccttttgagagcgcagttttgaaactctctttctgtggcatctgcaaggggacatgtagacctctttgaagatttcgttggaaacggaatcatcttcacataaaaactatacagaagcagtctcagaatcttctttgtgatgtttgcattcaaatcccagagttgaactttcctttcaaagttcacgtttgaaacactctttttgcaggatctacaagtggatatttggaccactctgtgtccttcgttcgaaacgggtatatcttcacacgacatctagacagaagctttctcagaaaattctttgggatgattgagtggaactcacagagctgaacattccttgcgatgtagcagtttagaaacacactttctgcagaatctgcaagtgcatatttggacctctctgaggaattcgttggaaacgggataatttcagctgactaaacagaagcattctcagaaccttcttcgtgatgtctgcattcaactcacagtgtggaacctttctttgatagttcaggtttgaaacactctttttgtagaaactgcaaggggataattgcacttctttgaggcctaccgtagtaaaggaaataacttcctatagaaagaagacagaagcattctcagaaccctcttcgtgatgtttgcattcaactcacagtgctgaacctttctttgatagttcagctttgaaacactcttcttgtagaaactgcaagtggatatttggtcctctctgaggatttcgttggaaacgggataaaccgcacagaactaaacagaagaattctcagagccctcttcgtgatgtttgcattcaactcacagtgctgaacttttctttgatagtgcagctttgaaacactctttttgtagaaactgcaagtggatgtttggtcctctctgaggatttcgttggaaacgggataaaccgcacagaactaaaacagaagcattgtcagaaacttctttgtgatgattgcattcaactcacagagttgaaggttccttttcaaacagcagtttccaatcactctttctgtggaatctgcaagtggatatttgggcctctctgaggatttcgttggaaacgggataaaacgcacagaactaaaacagaagcattctcagaaacttctctgtgatgtttgtgttcaactcccagagtttcacgttgcttttcatagagtagttctgaaacatgcttttcgtagtgtctgcaagtggacatttggagcgctttcaggcctgtggtggaaaacgaattatggtcacataaaaactggagagaagccttctcagaaacttctctgtgatgattgcattcaactcacagagttgaaccctcctatggatagagcagtgttgaaactctctttttgtggaatctgcaagtggatatgtggacctctccgaagatgtctttggaaacgggaatatcttcacataaaaactaaacagaagcattctcagaaacttcttggtgatgtttgcattcaaatcccagagttgaaccttcctttgatagttcaggtttgaaacactctttttgtaggatctgcaagtggctatttggaccactctgtggccttcgttcgaaacgggtatatcttcgcataaaatctagacagaagcattctcagaaaatactttgtgatgattgagtttaaatcacagagctgaacattcctttggatggagcaggtttgagacacactttttgtagaagctacaagtggatatttggacctctctgaggatttcgttggaaacgggataactgcacctaactaaacggaagcattctcagaaactgctttgtgatgattgcattcacctcacagagttgaacattcctattgatagagcagtttggaaacactcctgttgtggaatgtgcaagtggagatttggagcgctttgaggcctatggtagtaaagggaataacttcatagaaaaactagacagatgcattctcaggaactttttggtgatgtttgtattcaactcccagagttgaactttcctttggaaagagcagctatgaaacactctttttctagaatctgcaagtggacgtttggagggctttgtggtttgtggtggaaaaggaaatatcttcacgtaaatactacatagaagcattctcagaagcttctctgtgatgactgcattcaactcacggagttgaacactccttttgagagcgcagttttgaaactctctttctgtggcatctgcaaggggacatgtagacctctttgaagatttcgttggaaacggaatcatcttcacataaaaactatacagaagcagtctcagcatcttttttgtgatgtttgcattcaaatcccagagttgaactttcctttcaaagttcacgtttgaaacactctttttgcaggatctacaagtggatatttggaccactctgtgtccttcgttcgaaacgggtatatcttcacatgacatctagacagaagctttctcagaaaattctttgggatgattgagttcagcaaacagagctgaacactccttgcgatgtagcagtttagaaacacactttctgcagaatctgcaagtgcatatgtggacctctctgaggaattcgttggaaacgggataatttcagctgactaaacagaagcattctcagtaccttcttcgtgatgtctgcatgcaactcacagtgtggaacctttctttgatagttcaggtttgaaacactctttttgtggaaactgcaaggggataattgcacttctttgaggcccaccgtagtaatggaaataacttcctataaaaagaagacagaagcattctcagaaccctcttcgtgatgtttgcattcaactcacagtgctgaacctttctttgatagttcagctttgaaacactctttttgtagaaactgcaagtggatatttgatcctctctgaggatttcgttggaaacggcataaaccgcacagaactaaacagaagcattcacagaaaacacttggtgacgactgtgtttaactcacagagctgaacattcctttggatggagcagtttcgaaacacactctttgtagaatgtgcaagtggatatttgggcctctctgaggatttcgttggaaacgggataaaccgcacagaactaaaacagaagcattctcagaaactactttgtgatgattgcattcaagtcacagagctgaacattccctttgacagagcagtttggaaactctctttgtgtagaatctgcaagtgcagatatggaatgctttgaggactatggtagtaaaggaaatagcttcatagacaagctatacagtagcattctcagaaacttctttgtgatgcttgcattcaactcacagagttgaactttcctttcgagagagaagctttgaaacactctttttccagaatctgcaagtggacatttggagggctttgaggcctgtggtggaaaaggaattatcttcccgtaaaagctagatagaagcattgtcagaaacttctttgtgatgattgcattcaactcacagagttgaaggttgcttttcaaacagcagtttccaaacactctttctgtggaatctgcaagtggatatttggacctctttgaagatttcgttgggaaagggataatcttcacagaaaagctaaacagaagcattctcagaaacttctctgtgatgtttgtgttcaactcccagagtgtcacattgcttctcatagagtagttctgaaacatgcttttcgtagtgcctgcaaggggacatttggagcgctttcaggcctgtggtggaaaacgaattatggtcacataaaaactggagagaagccttctcagaaacttctctgtgatgattgcattcaactcacagagttgaaccctccctatggatagagcagtgttgaaactctctttttgtggaatctgcaagtgtatatgtggacctctccgaagatgtctttggaaacgggactatcttcacataaaaactaaacagaagcattctcagaaacttcttggtgatgtttgcattcaaatcccaaagttgaaccttcttttgagagttcaggtttgaaacactctttttgtaggatctgcaagtggatatttggaccactctgtggccttcgttcgaaacgggtacatcttcgcataaaatctagacagaagcattctcagaaaatactttgtgatgattgagtttaaatcacagagctgaacattcctttggatggagcaggtttgagacacactttttgtagaatctacaagtggatatttggacctctctgaggatttcgttggaaacgggataactgcacctaactaaacggaagcattctcagaaactgctttgtgatgattgcattcacctcacagagttgaacattactattgatagagcagtttggaaacactcttgttgtggaatgtgcaagtggagatttggagcgctttgaggcctatggtagtaaagggaatagcttcatagaaaaactagacagatgcattctcaggaactttttggtgatgtttgtattcaactcccagagttgaactttcctttggaaagagcagctatgaaacactctttttctagaatctgcaagtggacgtttggagggctttgtggtttgtggtggaaaaggaaatatcttcacctaaatactagacagaagcattctcagaagcttctctgtgatgactgcattcaactcacggagttgaacactccttttgagagcgcagttttgaaactctctttctgtggcatctgcaaggggacatgtagacctctttgaagatttcgttggaaacggaatcatcttcacataaaaactatacagaagcagtctcagaatcttctttgtgatgtttgcattcaaatcccagagttgaactttcctttcaaagttcacgtttgaaacactctttttgcaggatctacaagtggatatttggaccactctgtgtccttcgttcgaaacgggtatatcttcacacgacatctagacagaagctttctcagaaaattctttgggatgattgagtggaactcacagagctgaacattccttgcgatgtagcagtttagaaacacactttctgcagaatctgcaagtgcatatttggacctctctgaggaattcgttggaaacgggataatttcagctgactaaacagaagcattctcagaaccttcttcgtgatgtctgcattcaactcacagtgtggaacctttctttgatagttcaggtttgaaacactctttttgtagaaactgcaaggggataattgcacttctttgaggcctaccgtagtaaaggaaataacttcctatagaaagaagacagaagcattctcagaaccctcttcgtgatgtttgcattcaactcacagtgctgaacctttctttgatagttcagctttgaaacactcttcttgtagaaactgcaagtggatatttggtcctctctgaggatttcgttggaaacgggataaaccgcacagaactaaacagaagaattctcagagccctcttcgtgatgtttgcattcaactcacagtgctgaacctttctttgatagtgcagctttgaaacactctttttgtagaaactgcaagtggatgtttggtcctctctgaggatttcgttggaaacgggataaaccgcacagaactaaaacagaagcattgtcagaaacttctttgtgatgattgcattcaactcacagagttgaaggttccttttcaaacagcagtttccaatcactctttctgtggaatctgcaagtggatatttgggcctctctgaggatttcgttggaaacgggataaaacgcacagaactaaaacagaagcattctcagaaacttctctgtgatgtttgtgttcaactcccagagtttcacgttgcttttcatagagtagttctgaaacatgcttttcgtagtgtctgcaagtggacatttggagcgctttcaggcctgtggtggaaaacgaattatggtcacataaaaactggagagaagccttctcagaaacttctctgtgatgattgcattcaactcacagagttgaaccctcctatggatagagcagtgttgaaactctctttttgtggaatctgcaagtggatatgtggacctctccgaagatgtctttggaaacgggaatatcttcacataaaaactaaacagaagcattctcagaaacttcttggtgatgtttgcattcaaatcccagagttgaaccttcctttgatagttcaggtttgaaacactctttctgtaggatctgcaagtggctatttggaccactctgtggccttcgttcgaaacgggtatatcttcgcataaaatctagacagaagcattctcagaaaatactttgtgatgattgagtttaaatcacagagctgaccattcctttggatggagcaggtttgagacacactttttgtagaatctacaagtggatatttggacctctctgaggatttcgttggaaacgggataactgcacctaactaaacggaagcattctcagaaactgctttgtgatgattgcattcacctcacagagttgaacattcctattgatagagcagtttggaaacactcttgttgtggaatgtgcaagtggagatttggagcgctttgaggcctatggtagtaaagggaatagcttcatagaaaaactagacagatgcattctcaggaactttttggtgatgtttgtattcaactcccagagttgaactttcctttggaaagagcagctatgaaacactctttttctagaatctgcaagtggacgtttggagggctttgtggtttgtggtggaaaaggaaatatcttcacctaaatactagatagaagcattctcagaagcttctctgtgatgactgcattcaactcacggagttgaacactccttttgagagcgcagttttgaaactctctttctgtggcatccgcaaggggacatgtggacctctttgaagatttcgttggaaacggaatcatcttcacataaaaactatacagaagcagtctcagaatcttctttgtgatgtttgcattcaaatcccagagttgaactttcctttcaaagttcacgtttgaaacactctttttgcaggatctacaagtggatatttggaccactctgtgtccttcgttcgaaacgggtatatcttcacatgacagctagacagaagctttctcagaaaattctttgggatgattgagtggaactcacagagctgaacattccttgcgatgtagcagtttagaaacacactttctgcagaatctgcaagtgcatatttggacctctctgaggaattcgttggaaacgggataatttcagctgactaaacagaagcattctcagaaccttcttcgtgatgtctgcattcaactcacagtgtggaacctttctttgatagttcaggtttgaaacactctttttgtagaaactgcaaggggataattgcacttctttgaggcctaccgtagtaaaggaaataacttcctatagaaagaagacagaagcattctcagaaccctcttcgtgatgtttgcattcaactcacagtgctgaacctttctttgatagttcagctttgaaacactcttcttgtagaaactgcaagtggatatttggtcctctctgaggatttcgttggaaacgggataaaccgcacagaactaaacagaagaattctcagagccctcttcgtgatgtttgcattcaactcacagtgctgaacctttctttgatagtgcagctttgaaacactctttttgtagaaactgcaagtggatgtttggtcctctctgaggatttcgttggaaacgggataaaccgcacagaactaaaacagaagcattgtcagaaacttctttgtgatgattgcattcaactcacagagttgaaggttccttttcaaacagcagtttccaatcactctttctgtggaatctgcaagtggatatttgggcctctctgaggatttcgttggaaacgggataaaacgcacagaactaaaacagaagcattctcagaaacttctctgtgatgtttgtgttcaactcccagagtttcacgttgcttttcatagagtagttctgaaacatgcttttcgtagtgtctgcaagtggacatttggagcgctttcaggcctgtggtggaaaacgaattatggtcacataaaaactggagagaagccttctcagaaacttctctgtgatgattgcattcaactcacagagttgaaccctcctatggatagagcagtgttgaaactctctttttgtggaatctgcaagtggatatgtggacctctccgaagatgtctttggaaacgggaatatcttcacataaaaactaaacagaagcattctcagaaacttcttggtgatgtttgcattcaaatcccagagttgaaccttcctttgatagttcaggtttgaaacactctttttgtaggatctgcaattggctatttggaccactctgtggccttcgttcgaaacgggtatatcttcgcataaaatctagacagaagcattctcagaaaatactttgtgatgattgagtttaaatcacagagctgaccattcctttggatggagcaggtttgagacacactttttgtagaatctacaagtggatatttggacctctctgaggatttcgttggaaacgggataactgcacctaactaaacggaagcattctcagaaactgctttgtgatgattgcattcacctcacagagttgaacattcctattgatagagcagtttggaaacactcttgttgtggaatgtgcaagtggagatttggagcgctttgaggcctgtggtagtaaagggaatagcttcatagaaaaactagacagatgcattctcaggaactttttggtgatgtttgtattcaactcccagagttgaactttcctttggaaagagcagctatgaaacactctttttctagaatctgcaagtggacgtttggagggctttgtggtttgtggtggaaaaggaaatatcttcacctaaatactagatagaagcattctcagaagcttctctgtgatgactgcattcaactcacggagttgaacactccttttgagagcgcagttttgaaactctctttctgtggcatctgcaaggggacatgtagacctctttgaagatttcgttggaaacggaatcatcttcacataaaaactatacagaagcagtctcagaatcttctttgtgatgtttgcattcaaatcccagagttgaactttcctttcaaagttcacgtttgaaacactctttttgcaggatctacaagtggatatttggaccactctgtgtccttcgttcgaaacgggtatatcttcacatgacatctagacagaagctttctcagaaaattctttgggatgattgagttgaactcacagagctgaacattccttgcgatggagcagtttagaaacacactttctgcagaatctgcaagtgcatatttggacctctctgaggaattcgttggaaacgggataatttcagctgactaaacagaagcattctcagaaccttcttcgtgatgtctgcattcaactcacagtgtggaacatttctttgatacttcaggtttgaaacactctttttgtagagactgcaaggggataattgcacttctttgaggcctaccgtagtaaaggaaataacttcctataaaaagaagacagaagcattctcagaaccctcttcgtgatgtttgcattcaactcacagtgctgaaactttctttgatagttcagctttgaaacactctttttgtagaaactgcaagtggatacttggtcctctctgaggatttcgttggaaaagggataaaccgcacagaactaaacagaagcattcacagaaaactcttggtgacgactgagtttaactcacagaggtgaacattcctttggattgagcagtttcgaaacacactatttgtagaatctgcaagtggatatttgggcctctctgaggatttcgatggaaacgggataaaccgcacagaactaaaacagaagcattctcagaaactactttgtgatgattgcattcaagtcacagagctgaacattccctttgacagagcagtttggaaactctctttgtgtagaatctgcaagtggagatatggaatgctttgaggactatggtagtaaaggaaatagcttcatataaaagctagacagtagcattctcagaaacttctttgtgatgcttgcattcaactcacagagttgaactttcctttcgagagagaagctttgaaacactctttttccagaatctgcaagtggacatttggagggctttgaggcctgtggtggaaaaggaattatcttcccgtaaaagctagatagaagcattttcagaaacttctttgtgatgattgcattcaactcacagagttgaaggttccttttcaaacagcagtttccaatcactctttctgtggaatctgcaagtggatgtttggacctctttgaagatttcgttggaaacgggagaatcttcacagaaaagctaaacagaagctttctcagaaacttctctgtgatgtttgtattcaactcccagagtttcacattgcttttcatagagtacttctgaaacatgcttttcgtagtgtctgcaagtggacgtttggagcgctttcaggcctgtggtggaaaacgaattatggtcacataaaaactggagagaagccttcacagaaacttctctgtgatgattgcattcaactcacagagttgaacccccctatggatagagcagtgttgaaactctctttttgtggaatctgcaagtggatatgtggacctctccgaagatgtctttggaaacgggaatatcttcacataaaaactaaacagaagcattctcagaaacttcttggtgatgtttgcattcaaatcccagagttgaaccttcctttgatagttcaggtttgaaacactctttttgtaggatctgcaagtggatatttggaccactctgtggccttcgttcgaaacgggtatatcttcgcataaaatctagacagaagcattctcagaaaatactttgtgatgattgagtttaactcacagagctgaacattcctttggatggagcaggtttgagacacactttttgtagaatctacaagtggatatttggacctctctgaggatttcgttggaaacgggataactgcacctaactaaacggaagcattctcagaaactgctttgtgatgattgcattcacctcacagagttgaacattcctattgatagagcagtttggaaacactcttgttgtggaatgtgcaagtggagatttggagcgctttgaggcctatggtagtaaagggaatagcttcatagaaaaactagacagatgcattctcaggaactttttggtgatgtttgtattcaactcccagagttgaactttcctttggaaagagcagctatgaaacactctttttctagaatctgcaagtggacgtttggagggctttgtggtttgtggtggaaaaggaaatatcttcacctaaatactagatagaaagcattctcagcaagcttctctgtgatgactgcattcaactcacggagttgaacactccttttgagagcgcagttttgaaactctctttctgtggcatctgcaaggggacatgtagacctctttgaagatttcgttggaaacggaatcatcttcacatcaaaactatacagaagcagtctcagaatcttctttgtggtgtttgcattcaaatcccagagttgaactttcctttcaaagttcacgtttgaaacactctttttgcaggatctacaagtggatatttggaccactctgtgtccttcgttcgaaacgggtatatcttcacatgacatctagacagaagctttctcagaaaattctatgggatgattgagtggaactcacagagctgaacattccttgcgatgtagcagtttagaaacacactttctgcagaatctgcaagtgcatatttggacctctctgaggaattcgttggaaacgggataatttcagctgactaaacagaagcattctcagaaccttcttcgtgatgtctgcattcaactcacagtgtggaacctttctttgatagttcaggtttgaaacactctttttgtagaaactgcaaggggataattgcacttctttgaggcctaccgtagtaaaggaaataacttcctatagaaagaagacagaagcattctcagaaccttcttcgtgatgtttgcattcaactcacagtgctgaacctttctttgatagttcagctttgaaacactcttcttgtagaaactgcaagtggatatttggtcctctctgaagatttcgttggaaacgggataaaccgcacagaactaaacagaagcattcacagaaaactcttggtgacgactgagtttaactcacagagctgaacattcctttggatggaggagtttcgaaacacactatttgtagaatgtgcaagtggatattggggcctctctgaggatttcgttggaaacgggataaaccgcagagaactaaacagaaacattctcagaaactactttgtgatgattgcattcaagtcacagagttgaacattccctttgacagagcagtttggaaactctctttgtgtagaatctgcaagtggagatatggaccgctttgaggcctatggtagtaaaggaaatagcttcatataaaagctagacagtagcattctcagaaacttcttggtgatgcttgcattcaactcacagagttgaactttcctttcgagagagaagctttgaaacactctttttccagaatctgcaagtggacatttggagggctttgaggcctgtggtggaaaaggaattatcttcccgtaaaagctagatagaagcattgtcagaaacttctttgtgatgattgcattcaactcacagagttgaaggttccttttcaaagagcagtttccaatcactctttctgtggaatctgcaagtggatatttcgacctattttgaagatttcattggaaacgggataatcttcacagaaaagctaaacagaagcattctcagaaacttctctgtgatgtttgtgttcaactcccagagtttcacgttgcttttcatagagtagttctgaaacatgcttttcgtagtgtctgcaagtggacatttggagcgctttcaggcctgtggtggaaaacgaattatggtcacataaaaactggagagaagccttctcagaaacttctctgtgatgattgcattcaactcacagagttgaaccctcctatggatagagcagtgttgaaactctctttttgtggaatctgcaagtggatatgtggacctctccgaagatgtctttggaaacgggaatatcttcacataaaaactaaacagaagcattctccgaaacttcttggtgatgtttgcattcaaatcccagagttgaaccttcctttgatagttcaggtttgaaacactctttctgtaggatctgcaagtggctatttggaccactctgtggccttcgttcgaaacgggtatatcttcgcataaaatctagacagaagcattctcagaaaatactttgtgatgattgagtttaactcacagagctgaacattcctttggatggagcaggcttgagacacactttttgtagaatccacaagtggatatttggacctctctgaggatttcgttggaaacgggataactgcaccgaactaaacggaagcattctcagaaactgctttgtgatgattgcattcacctcacagagttgaccaatcctattgatagagcagtttggagacactcttgttgtggaatgtgcaagtggagatatggagcgcttcgaggcctatggtagtaaagggaatagcttcatagaaaaactagacagatgcattctcaggaactttttggtgatgtttgtattcaactcccagagttgaactttcctttggaaagagcagctatgaaacactctttttctagaatctgcaagtggacgtttggagggctttgtggtttgtggtggaaaaggaaatatcttcacctcaatactagatagaagcattctcagaagcttctctgtgatgactgcattcaactcacggagttgaacactccttttgagagcgcagttttgaaactctctttctgtggcatctgcaaggggacatgtagacctctttgaagatttcgttggaaacggaatcatcttcacatcaaaactatacagaagcagtctcagaatcttctttgtgatgtttgcattcaaatcccagagttgaactttcctttcaaagttcacgtttgaaacactctttttgcaggatctacaagtggatatttggaccactctgtgtccttcgttcgaaacgggtatatcttcacatgacatctagacagaagctttctcagaaaattctttgggatgattgagtggaactcacagagctgaacattccttgcgatgtagcagtttagaaacacactttctgcagaatctgcaagtgcatatttggacctctccgaggaattcgttggaaacgggataatttcagctgactaaacagaagcattctcagaaccttcttcgtgatgtctgcattcaactcacagtgtggaacctttctttgatagttcaggtttgaaacactctttttgtagaaactgcaaggggataattgcacttctttgaggcctaccgtagtaaaggaaataacttcctatagaaagaagacagaagcattctcagaaccctcttcgtgatgtttgcattcaactcacagtgctgaacctttctttgatagttcagctttgaaacactcttcttgtagaaactgcaagtggatatttggtcctctctgaggatttcgttggaaacgggataaaccgcacagaactaaacagaagaattctcagagccctcttcgtgatgtttgcattcaactcacagtgctgaacctttctttgatagtgcagctttgaaacactctttttgtagaaactgcaagtggatgtttggtcctctctgaggatttcgttggaaacgggataaaccgcacagaactaaaacagaagcattgtcagaaacttctttgtgatgattgcattcaactcacagagttgaaggttccttttcaaacagcagtttccaatcactctttctgtggaatctgcaagtggatatttgggcctctctgaggatttcgttggaaacgggataaaacgcacagaactaaaacagaagcattctcagaaacttctctgtgatgtttgtgttcaactcccagagtttcacgttgcttttcatagagtagttctgaaacatgcttttcgtagtgtctgcaagtggacatttggagcgctttcaggcctgtggtggaaaacgaattatggtcacataaaaactggagagaagccttctcagaaacttctctgtgatgattgcattcaactcacagagttgaaccctcctatggatagagcagtgttgaaactctctttttgtggaatctgcaagtggatatgtggacctctccgaagatgtctttggaaacgggaatatcttcacataaaaactaaacagaagcattctcagaaacttcttggtgatgtttgcattcaaatcccagagttgaaccttcctttgatagttcaggtttgaaacactctttctgtaggatctgcaagtggctatttggaccactctgtggccttcgttcgaaacgggtatatcttcgcataaaatctagacagaagcattctcagaaaatactttgtgatgattgagtttaaatcacagagctgaccattcctttggatggagcaggtttgagacacactttttgtagaatctacaagtggatatttggacctctctgaggatttcgttggaaacgggataactgcacctaactaaacggaagcattctcagaaactgctttgtgatgattgcattcacctcacagagttgaacattcctattgatagagcagtttggaaacactcttgttgtggaatgtgcaagtggagatttggagcgctttgaggcctatggtagtaaagggaatagcttcatagaaaaactagacagatgcattctcaggaaccttttggtgatgtttgtattcaactcccagagttgaactttcctttggaaagagcagctatgaaacactctttttctagaatctgcaagtggacgtttggagggctttgtggtttgtggtggaaaaggaaatatcttcacctaaatactagatagaagcattctcagaagcttctctgtgatgactgcattcaactcacggagttgaacactccttttgagagcgcagttttgaaactctctttctgtggcatctgcaaggggacatgtagacctctttgaagatttcgttggaaacggaatcatcttcacataaaaactatacagaagcagtctcagaatcttctttgtgatgtttgcattcaaatcccagagttgaactttcctttcaaagttcacgtttgaaacactctttttgcaggatctacaagtggatatttggaccactctgtgtccttcgttcgaaacgggtatatcttcacacgacatctagacagaagctttctcagaaaattctttgggatgattgagtggaactcacagagctgaacattccttgcgatgtagcagtttagaaacacactttctgcagaatctgcaagtgcatatttggacctctctgaggaattcgttggaaacgggataatttcagctgactaaacagaagcattctcagaaccttcttcggtgatgtctgcattcaactcacagtgtggaacctttctttgatagttcaggtttgaaacactctttttgtagaaactgcaaggggataattgcacttctttgaggcctaccgtagtaaaggaaataacttcctatagaaagaagacagaagcattctcagaaccctcttcgtgatgtttgcattcaactcacagtgctgaacctttctttgatagttcagctttgaaacactcttcttgtagaaactgcaagtggatatttggtcctctctgaggatttcgttggaaacgggataaaccgcacagaactaaacagaagaattctcagagccctcttcgtgatgtttgcattcaactcacagtgctgaacctttctttgatagtgcagctttgaaacactctttttgtagaaactgcaagtggatgtttggtcctctctgaggatttcgttggaaacgggataaaccgcacagaactaaaacagaagcattgtcagaaacttctttgtgatgattgcattcaactcacagagttgaaggttccttttcaaacagcagtttccaatcactctttctgtggaatctgcaagtggatatttgggcctctctgaggatttcgttggaaacgggataaaacgcacagaactaaaacagaagcattctcagaaacttctctgtgatgtttgtgttcaactcccagagtttcacgttgcttttcatagagtagttctgaaacatgcttttcgtagtgtctgcaagtggacatttggagcgctttcaggcctgtggtggaaaacgaattatggtcacataaaaactggagagaagccttctcagaaacttctctgtgatgattgcattcaactcacagagttgaaccctcctatggatagagcagtgttgaaactctctttttgtggaatctgcaagtggatatgtggacctctccgaagatgtctttggaaacgggaatatcttcacataaaaactaaacagaagcattctcagaaacttcttggtgatgtttgcattcaaatcccagagttgaaccttcctttgatagttcaggtttgaaacactctttttgtaggatctgcaagtggctatttggaccactctgtggccttcgttcgaaacgggtatatcttcgcataaaatctagacagaagcattctcagaaaatactttgtgatgattgagtttaaatcacagagctgaacattcctttggatggagcaggtttgagacacactttttgtagaatctacaagtggatatttggacctctctgaggatttcgttggaaacgggataactgcacctaactaaacggaagcattctcagaaactgctttgtgatgattgcattcacctcacagagttgaacattcctattgatagagcagtttggaaacactcttgttgtggaatgtgcaagtggagatttggagcgctttgaggcctatggtagtaaagggaatagcttcatagaaaaactagacagatgcattctcaggaactttttggtgatgtttgtattcaactcccagagttgaactttcctttggaaagagcagctatgaaacactctttttctagaatctgcaagtggacgtttggagggctttgtggtttgtggtggaaaaagaaatatcttcacctaaatactagatagaagcattctcagaagcttctctgtgatgactgcattcaactcacggagttgaacactccttttgagagcgcagttttgaaactccctttctgtggcatctgcaaggggacatgtagacctctttgaagatttcgttggaaacggaatcatcttcacataaaaactatacagaagcagtctcagaatcttctttgtgatgtttgcattcaaatcccagagttgaactttcctttcaaagttcacgtttgaaacactctttttgcaggatctacaagtggatatttggaccactctgtgtccttcgttcgaaacggctatatcttcacacgacatctagacagaagctttctcagaaaattctttgggatgattgagttgaactcacagagctgagcattccttgcgatgtagcagtttagaaacacactttctgcagaatctgcaagtgcatatgtggacctctctgaggaattcgttggaaacgggataatttcagctgactaaacagaagcattctcagaaccttcttcgtgatgtctgcattcaactcaaagtgtggaacctttctttgatagttcaggttttaaaaactctttttgtagaaactgcaaggggataattgcactctttgaggagtaccgtagtaaaggaaataacttcctataaaaagaagacagaagcattctcagaaccctcttcgtgatgtttgcattcaactcacagtgctgaacctttctttgatagttcagctttgaaacactctttttgtagaaactgcaagtggatatttggtcctctctgaggatttcgttggaaacgggataaaacgcacagaacgaaacagaagcattctcagaaccttcttcgtgatgtttgcattcaactcacagtgttgaacctttctttgatagttcaggtttgaaacggtctttctgtagaaactgcaagtagatatttggacctctctgaggatttcgttggaaacgggataaacagcacagaactaaaacagaagcattcacagaaaactcttggtgacgactgagtttaactcacagagctgaacatttctttggatggagcagtttcgaaacacactatttgtagaatgtgcaagtggatatttgggcctctctgaggatttcgttggaaacgggataaaccgcacagaactaaacagaagcattctcagaaactactttgtgatgattgcattcaagtcacagagttgaacattccctttgacagagcagtttggaaactctctttgtgtagaatctgcaagtggagatatggaccgctttgaggcctatggtagtaaaggaaatagcttcatataaaagctagacagtagcattctcagaaacttctttgtgatgcttgcattcaactcacagagttgaactttcctttcgagagagaagctttgaaacactctttttccagaatctgcaagtggacatttggagggctttgaggcctgtggtggaaaaggaattatcttcccgtaaaagctagatagaaagcattgtcagaaacttctttgtgatgattgcattcaactcacagagttgaaggttccttttcaaagagcagtttccaatcactctttctgtggaatctgcaagtggatatttggacctattttgaagatttcgttggaaacgggagaatcttcacaggaaagctaaacagaagcattctcagaaacttctctgtgatgtttgtgttcaactcccagagtttcacattgcttttcatagagtagttctgaaacatgcttttcgtagtgtctgcaagtggacatttggagcgctttcaggcctgtggtggaaaacgaattatggtcacataaaaactggagagaagccttctcagaaacttctctgtgatgattgcattcaactcacagagttgaaccctcctgtggatagagcagtgttgaaactctctttttgtggaatctgcaagtggatatgtggacctctccgaagatgtctttggaaacgggaatatcttcacataaaaactaaacagaagcattctcagaaacttcttggtgatgtttgcattcaaatcccagagttgaaccttcctttgatagttcaggtttgaaacactctttttgtaggatctgcaagtggatatttggaccactctgtggccttcgttcgaaacgggtacatcttcgcataaaatctagacagaagcattctcagaaaatactttgtgatgattgagtttaactcacagagctgaacattcctttggatggagcaggtttgagacacactttttgtagaatctacaagtggatatttggacctctctgaggatttcgttggaaacgggataactgcacctaactaaacggaagcattctcagaaactgctttgtgatgattgcattcacctcacagagttgaacattcctattgatagagcagtttggaaacactcttgttgtggaatgtgcaagtggagatttggagcgctttgaggcctatggtagtaaagggaatagcttcatagaaaaactagacagatgcattctcaggaactttttggtgatgtttgtattcaactcccagagttgaactttcctttggaaagagcagctatgaaacactctttttctagaatctgcaggtggacgtttggagggctttgtggtttgtggtggaaaaggaaatatcttcacctaaatactagatagaagcatcctcagaagcttctctgtgatgactgcattcaactcacggagttgaacactccttttgagagcgcagttttgaaactctctttctgtggcatctgcaaggggacatgtagacctctttgaagatttcgttggaaacggaatcatcttcacataaaaactacacagaagcagtctcagaatcttctttgtgatgtttgcattcaaatccccgagttgaactttcctttcaaagttcacgtttgaaacactctttttgcaggatctacaagtggatatttggaccactctgtgtccttcgttcgaaacgggtatatcttcacatgacatctagacagaagctttctcagaaaattctttgagatgattgagttgaactcacagagctgagcattccttgcgatgtagcagtttagaaacacactttctgcagaatctgcaagtgcatatttggacctctgtgaggaattcgttggaaacgggataatttcagctgactaaacagaagcattctcagaaccttcttcgtgatgtctgcattcaactcacagtgtggaacctttctttgatagttcaggtttgaaacactctttttgtagaaactgcaaggggataattgcactctttgaggagtaccgtagtaaaggaaataacttcctataaaaagaagacagaagcattctcagaaccctcttcgtgatgtttgcattcaactcacagtgctgaacctttctttgatagttcagctttgaaacactctttttgtagaaactgcaagtggatatttggtcctctctgaggatttcgttggaaacgggataaaccgcacagaactaaacagaagcaatctcagaaccttcttcgtgatgtttgcattcaactcaacagtgttgaacctttctttgatagttcaggtttgaaacggtctttctgtagaaactgcaagtagatatttggaccgctctgaggatttcgttggaaacgggataacccgcacagaactaaaacagaagcattcagaaaaaactcttggtgacgactgagtttaactcacagagctgaacattcctttggatggagcagtttcgaaacacactatttgtagaatgtgcaagtggatatttgggcctctctgaggatttcgttggaaacgggataaaccgcacagaactaaacagaagcattctcagaaactactttgtgatgattgcattcaagtcacagagttgaacattccctttgacagagcagtttggaaactctctttgtgtagaatctgcaagtagagatatggaccgctttgaggcctatggtagtaaaggaaatagcttcatataaaagctagacagtagcattctcagaaacttctttgtgatgcttgcattcaactcacagagttgaactttcctttcgagagagaagctttgaaacactctttttccagaatctgcaagtggacatttggagggctttgaggcctgtggtggaaaaggaattatcttcccgtaaaagctagacagaagcattgtcagaaacttctttgtgatgattgcattcaactcacagagttgaaggttccttttcaaagagcagtttccaatcactctttctgtggaatctgcaagtggatgtttggacctctttgaagatttcgttggaaacgggagaatcttcacagaaaagctaaacagaagcattctcagaaacttctctgtgatgtttgtgttcaactcccagagtttcacgttgcttttcatagagtagttctgaaacatgctttttgtagtgtctgcaagtggacatttggagcgctttcaggcctgtggtggaaaacgaattatggtcacataaaaactggagagaagccttctcagaaacttctctgtgatgattgcattcaactcacagagttgaaccctcctatggatagagcagtgttgaaactctctttttgtggaatctgcaagtggatatgtggacctctccgaagatgtctttggaaacgggaatatcttcacataaaaactaaacagaagcattctcagaaacttcttggtgatgtttgcattcaaatcccagagttgaaccttcctttgatagttcaggtttgaaacactctttctgtaggatctgcaagtggctatttggaccactctgtggccttcgttcgaaacgggtatatcttcgcataaaatctagacagaagcattctcagaaaatactttgtgatgattgagtttaaatcacagagctgaccattcctttggatggagcaggtttgagacacactttttgtagaatctacaagtggatatttggacctctctgaggatttcgttggaaacgggataactgcacctaactaaacggaagcattctcagaaactgctttgtgatgattgcattcacctcacagagttgaacattcctattgatagagcagtttggaaacactcttgttgtggaatgtgcaagtggagatttggagcgctttgaggcctatggtagtaaagggaatagcttcatagaaaaactagacagatgcattctcaggaactttttggtgatgtttgtattcaactcccaagagttgaactttcctttggaaagagcagctatgaaacactctttttctagaatctgcaagtggacgtttggagggctttgtggtttgtggtggaaaaggaaatatcttcacctaaatactagatagaagcattctcagaagcttctctgtgatgactgcattcaactcacggagttgaacactccttttgagagcgcagttttgaaactctctttctgtggcatccgcaaggggacatgtagacctgtttgaagatttctttggaaagggaatcatcttcacataaaaactatacagaagcagtctcagaatcttctttgtgatgtttgcattcaaatcccagagttgaactttcctttcaaagttcacgtttgaaacactctttttgcaggatctacaagtggatatttggaccactctgtgtccttcgttcgaaacgggtatatcttcacatgacatctagacagaagctttctcagaaaattctttgggatgattgagtggaactcacagagctgaacattccttgcgatgtagcagtttagaaacacactttctgcagaatctgcaagtgcatatttggacctctccgaggaattcgttggaaacgggataatttcagctgactaaacagaagcattctcagaaccttcttcgtgatgtctgcattcaactcacagtgtggaacctttctttgatagttcaggtttgaaacactctttttgtagaaactgcaaggggataattgcacttctttgaggcctaccgtagtaaaggaaataacttcctatagaaagaagacagaagcattctcagaaccctcttcgtgatgtttgcattcaacacacagtgctgaacctttctttgatacttcagctttgaaacactcttcttgtagaaactgcaagtggatatttggtcctctctgaggatttcgttggaaacgggataaaccgcacagaactaaacagaagcattctcagaaccttcttcgtgatgtttgcattcaactcacagtgttgaacctttctttgatagttcaggtttgaaacggtctttctgtagaaactgcaagtagatatttggacctctctgaggatttcgttggaaacgggataacccgcacagaactaaaacagaagcattcacagaaaactcttggtgacgactgagtttaactcacagagctgaacattcctttggatggagcagtttcgaaacacactatttgtagaatgtgcaagtggatatttaggcctctctgaggatttcgttggaaacgggataaaccgcacagaactaaacagaagcattctcagaaactactttgtgatgattgcattcaagtcacagagttgaacattccctttgacagagcagtttggaaactctctttgtgtagaatctgcaagtggagatatggaccgctttgaggcctatggtagtaaaggaaatagcttcatataaaagctagacagtagcattctcagaaacttctttgtgatgcttgcattcaactcacagagttgaactttcctttcgagagagaagctttgaaacactctttttccagaatctgcaagtggacatttggagggctttgaggcctgtggtggaaaaggaattatcttcccgtaaaagctagatagaagcattgtcagaaacttctttgtgatgattgcattcaagtcacagagttgaaggttccttttcaaagagcagtttccaatcactctttctgtggaatctgcaagtggatatttggacctctttgaagatttcgttggaaacgggagaatcttcacagaaaagctaaacagaagcattctcagaaacttctctgtgatgtttgtgttcaactcccagagtttcacgttgcttttcatagagtagttctgaaacatgcttttcgtagtgtctgcaagtggacatttggagcgctttcaggcctgtggtggaaaacgaattatggtcacataaaaactggagagaagccttctcagaaacttctctgtgatgattgcattcaactcacagagttgaaccctcctatggatagagcagtgttgaaactctctttttgtggaatctgcaagtggatatgtggacctctccgaagatgtctttggaaacgggaatatcttcacataaaaactaaacagaagcattctcagaaacttcttggtgatgtttgcattcaaatcccagagttgaaccttcctttgatagttcaggtttgaaacactctttctgtaggatctgcaagtggctatttggaccactctgtggccttcgttcgaaacgggtatatcttcgcataaaatctagacagaagcattctcagaaaatactttgtgatgattgagtttaaatcacagagctgaccattcctttggatggagcaggtttgagacacactttttgtagaatctacaagtggatatttggacctctctgaggatttcgttggaaacgggataactgcacctaactaaacggaagcattctcagaaactgctttgtgatgattgcattcacctcacagagttgaacattcctattgatagagcagtttggaaacactcttgttgtggaatgtgcaagtggagatttggagcgctttgaggcctatggtagtaaagggaatagcttcatagaaaaactagacagatgcattctcaggaactttttggtgatgtttgtattcaactcccagagttgaactttcctttggaaagagcagctatgaaacactctttttctagaatctgcaagtggacgtttggagggctttgtggtttgtggtggaaaaggaaatatcttcacctaaatactagatagaagcatcctcagaagcttctctgtgatgactgcattcaactcacggagttgaacactccttttgagagcgcagttttgaaactctctttctgtggcatctgcaaggggacatgtagacctctttgaagatttcgttggaaacggaatcatcttcacataaaaactacacagaagcagtctcagaatcttctttgtgatgtttgcattcaaatccccgagttgaactttcctttcaaagttcacgtttgaaacactctttttgcaggatctacaagtggatatttggaccactctgtgtccttcgttcgaaacgggtatatcttcacatgacatctagacagaagctttctcagaaaattctttgggatgattgagttgaactcacagagctgagcattccttgcgatgtagcagtttagaaacacactttctgcagaatctgcaagtgcatatttggacctctgtgaggaattcgttggaaacgggataatttcagctgactaaacagaagcattctcagaaccttcttcgtgatgtctgcattcaactcacagtgtggaacctttctttgatagttcaggtttgaaacactctttttgtagaaactgcaaggggataattgcactctttgaggagtaccgtagtaaaggaaataacttcctataaaaagaagacagaagcattctcagaaccctcttcgtgatgtttgcattcaactcacagtgctgaacctttctttgatagttcagctttgaaacactctttttgtagaaactgcaagtggatatttggtcctctctgagcatttcgttggaaacgggataaactgcacagaactaaacagaagcattctcagaaccttcttcgtgatgtttgcattcaactcacagtgttgaacctttctttgatagttcaggtttgaaacggtctttctgtagaaactgcaagtagatatttggacctctctgaggatttcgttggaaacgggataacccgcacagaactaaaacagaagcattcacagaaaactcttggtgacgactgagtttaactcacagagctgaacattcctttggatggagcagtttcgaaacacactatttgtagaatgtgcaagtggatatttaggcctctctgaggatttcgttggaaacgggataaaccgcacagaactaaacagaagcattctcagaaactactttgtgatgattgcattcaagtcacagagttgaacattccctttgacagagcagtttggaaactctctttgtgtagaatctgcaagtggagatatggaccgctttgaggcctatggtagtaaaggaaatagcttcatataaaagctagacagtagcattctcagaaacttctttgtgatgcttgcattcaactcacagagttgaactttcctttcgagagagaagctttgaaacactctttttccagaatctgcaagtggacatttggagggctttgaggcctgtggtggaaaaggaattatcttcccgtaaaagctagatagaagcattgtcagaaacttctttgtgatgattgcattcaactcacagagttgaaggttccttttcaaagagcagtttccaatcactctttctgtggaatctgcaagtggatatttggacctattttgaagatttcgttggaaacgggagaatcttcacaggaaagctaaacagaagcattctcagaaacttctctgtgatgtttgtgttcaactcccagagtttcacattgcttttcatagagtagttctgaaacatgcttttcgtagtgtctacaagtggacatttggagcgctttcaggcctgtggtggaaaacgaattatggtcacataaaaactggagagaagccttctcagaaacttctctgtgatgattgcattcaactcacagagttgaaccctcctatggatagagcagtgttgaaactctctttttgtggaatctgcaagtggatatgtggacctctccgaagatgtctttggaaacgggaatatcttcacataaaaactaaacagaagcattctcagaaacttcttggtgatgtttgcattcaaatcccagagttgaaccttcctttgatagttcaggtttgaaacactctttttgtaggatctgcaagtggatatttggaccactctgtggccttcgttcgaaacgggtatatcttcgcataaaatctagacagaaagcattctcagaaaatactttgtgatgattgagtttaactcacagagctgaacattcctttggatggagcaggtttgagtcacactttttgtagaatctacaagtggatatttggacctctctgaggatttcgttggaaacgcgataactgcacctaactaaacggaagcattctcagaaactgctttgtgatgattgcattcacctcacagagttgaatattcctattgatagagcagtttggaaacactcttcttgtggaatgtgcaagtggagatttggagcgctttgaggcctatggtagtaaagggaatagcttcatagaaaaactagacagatgcattctcaggaactttttggtgatgtttgtattcaactcccagagttgaactttcctttggaaagagcagctatgaaacactctttttctagaatctgcaagtggacgtttggagggctttgtggtttgtggtggaaaaggaaatatcttcacctaaatactagatagaagcatcctcagaagcttctctgtgatgactgcattcaactcatggagttgaacactccttttgagagcgcagttttgaaactctctttctgtggcatctgcaaggggacatgtagacctctttgaagatttcgttggaaacggaatcatcttcacataaaaactacacagaagcagtctcagaatcttctttgtgatgtttgcattcaaatcccagagttgaactttcctttcaaagttcacgtttgaaacactctttttgcaggatctacaagtggatatttggaccactctgtgtccttcgttcgaaacgggtatatcttcacatgacatctagacagaagctttctcagaaaattctttgggatgattgagttgaactcacagagctgagcattccttgcgatgtagcagtttagaaacacactttctgcagaatctgcaagtgcatatttggacctctctgaggaattcgttggaaacgggataatttcagctgactaaacagaagcattctcagaaccttcttcgtgatgtctgcattcaactcacagtgtggaacctttctttgatagttcaggtttgaaacactctttctgtagaaactgcaaggggataattgcactctttgaggagtaccgtagtaaaggaaataacttcctataaaaagaagacagaagcattctcagaaccctcttcgtgatgtttgcattcaactcacagtgctgaacctttctttgatagttcagctttgaaacactctttttgtagaaactgcaagtggatatttggtcctctctgagcatttcgttggaaacgggataaactgcacagaactaaacagaagcattctcagaaccttcttcgtgatgtttgcattcaactcacagtgttgaacctttctttgatagttcaggtttgaaacgttctttctgtagaaactgcaagtagatatttggacctctctgaggatttcgttggaaacgggataacccgcacagaactaaaacagaagcattcacagaaaacccttggtgacgactgagtttaactcacagagctgaacattcctttggatggagcagtttcgaaacacactatttgtagaatctgcaagtggatatttgggcctctctgaggatttcgatggaaacgggataaaccgcacagaactaaaacagaaacattctcagaaactactttgtgatgattgcattcaagtcacagagttgaacattccctttgacagagcagtttggaaactctctttgtgtagaatctgcaagtggagatatggaccgctttgaggcctatggtagtaaaggaaatagcttcatataaaagctagacagtagcattctcagaaacttctttgtgatgcttgcattcaactcacagagttgaactttcctttcgagagagaagctttgaaacactctttttccagaatctgcaagtggacatttggagggctttgaggcctgtggtggaaaaggaattatcttcccgtaaaagctagatagaagcattgtcagaaacttctttgtgatgattgcattcaactcacagagttgaaggttccttttcaaagagcagtttccaatcactctttctgtggaatctgcaagtggatatttggacctctttgaagatttcgttggaaacgggagaatcttcacagaaaagctaaagagaagcattctcagaaacttctctgtgatgtttgtgttcaactcccagagtttcacattgcttttcatagagtagttctgaaacatgcttttcgtagtgtctacaagtggacatttggagcgctttcaggcctgtggtggaaaacgaattatggtcacataaaaactggagagaagccttctcagaaacttctctgtgatgattgcattcaactcacagagttgaaccctcctatggatagagcagtgttgaaactctctttttgtggaatctgcaagtggatatgtggacctctccgaagatgtctttggaaacgggaatatcttcacataaaaactaaacagaagcattctcagaaacttcttggtgatgtttgcattcaaatcccagagtcgaaccttcctttgatagttcaggtttgaaacactctttttgtaggatctgcaagtggatatttggaccactctgtggccttcgttcgaaacgggtatatcttcgcataaaatctagacagaagcattctcagaaaatactttgtgatgattgagtttaactcacagagctgaacattcctttggatggagcaggtttgagacacactttttgtagaatctacaagtggatatttggacctctctgaggatttcgttggaaacgggataactgcacctaactaaacggaagcattctcagaaactgctttgtgatgattgcattcacctcacagagttgaacattcctattgatagagcagtttggaaacactcttgttgtggaatgtgcaagtggagatttggagcgctttgaggcctatggtagtaaagggaatagcttcatagaaaaactagacagatgcattctcaggaactttttggtgatgtttttattcaactcccagagttgaactttcctttgcaaagagcagctatgaaacactctttttctagaatctgcaagtggacgtttggagggctttgtggtttgtggtggaaaaggaaatatcttcacctaaatactagatagaagcattctcagaagcttctctgtgatgactgcattcaactcacggagttgaacactccttttgagagcgcagttttgaaactctctttctgtggcatctgcaaggggacatgtagacctctttgaagatttcgttggaaacggaatcatcttcacataaaaactatacagaagcagtctcagaatcttctttgtgatgtttgcattcaaatcccagagttgaactttcctttcaaagttcacgtttgaaacactctttttgcaggatctacaagtggatatttggaccactctgtgtccttcgttcgaaacgggtgtatcttcacatgacatctagacagaagctttctcagaaaattctttgggatgattgagtggaactcacagatctgaacattccttgtgatgtagcagtttagaaacacactttctgcagaatctgcaagtgcatatgtggacctctctgaggaattcgttggaaacgggataatttcagctgattaaacagaagcattctcagaaccttcttcgtgatgtctgcattcaactcacagtgtggaacttttctttgatagttcaggtttgaaacactctttttgtagaaactgcaaggggatcattgcacttctttgaggcctaccgtagtaaaggaaataacttcctataaaaagaagacagaagcattctcagaaccctcttcgtgatgtttgcattcaactcacagtgctgaacctttctttgatagttcagctttgaaacactcttcttgtagaaactgcaagtggatatttggtcctctctgaggatttcgttggaaacgggataaaccgcacagaactaaacagaagaattctcagagccctcttcgtgatgtttgcattcaactcacagtgctgaacctttctttgatagtgcagctttgaaacactctttttgtagaaactgcaagtggatatttggtcctctctgaggatttcgctggaaacgggataaaccgcacagaactaaaacagaagcattgtcagaaacttctttgtgatgattgcattcaactcacagagttgaaggttccttttcaaacagcagtttccaatcactctttctgtggaatctgcaagtggatatttgggcctctctgaggatttcgttggaaacgggataaaacgcacagaactaaaacagaagcattctcagaaacttctctgtgatgtttgtgttcaactcccagagtttcacgttgcttttcatagagtagttctgaaacatgcttttcgtagtgtctgcaagtggacatttggagcgctttcaggcctgtggtggaaaacgaattatggtcacataaaaactggagagaagccttctcagaaacttctctgtgatgattgcattcaactcacagagttgaaccctcctatggatagagcagtgttgaaactctctttttgtggaatctgcaagtggatatgtggacctctccgaagatgtctttggaaacgggaatatcttcacataaaaactaaacagaagcattctcagaaacttcttggtgatgtttgcattcaaatcccagagttgaaccttcctttgatagttcaggtttgaaacactctttctgtaggatctgcaagtggctatttggaccactctgtggccttcgttcgaaacgggtatatcttcgcataaaatctagacagaagcattctcagaaaatactttgtgatgattgagtttaaatcacagagctgaccattcctttggatggagcaggtttgagacacactttttgtagaatctacaagtggatatttggacctctctgaggatttcgttggaaacgggataactgcacctaactaaacggaagcattctcagaaactgctttgtgatgattgcattcacctcacagagttgaacattcctattgatagagcagtttggaaacactcttgttgtggaatgtgcaagtggagatttggagcgctttgaggcctatggtagtaaagggaatagcttcatagaaaaactagacagatgcattctcaggaactttttggtgatgtttgtattcaactcccagagttgaactttcctttggaaagagcagctatgaaaccctctttttctagaatctgcaagtggacgtttggagggctttgtggtttgtggtggaaaaggaaatatcttcacctaaatactagatagaagcattctcagaagcttctctgtgatgactgcattcaactcacggagttgaacactccttttgagagcgcagttttgaaactccctttctgtggcatctgcaaggggacatgtagacctctttgaagatttcgttggaaacggaatcatcttcacataaaaactatacagaagcagtctcagaatcttctttgtggtgtttgcattcaaatcccagagttgaactttcctttcaaagttcacgtttgaaacactctttttgcaggatctacaagtggatatttggaccactctgtgtccttcgttcgaaacgggtatatcttcacatgacatctagacagaagctttctcagaaaattctttgggatgattgagtggaactcacagagctgaacattccttgcgatgtagcagtttagaaacacactttctgcagaatctgcaagtgcatatttggacctctctgaggaatacgttggaaacgggataatttcagctgactaaacagaagcattctcagaaccttcttcgtgatgtctccattcaactcacagtgtggaacctttctttgatagttcaggtttgaaacactctttttgtagaaactgcaaggggataattgcacttctttgaggcctaccgtagtaaaggaaataacttcctatagaaagaagacagaagcattctcagaaccctcttcgtgatgtttgcattcaactcacagtgctgaacctttctttgatagttcagctttgaaacactcttcttgtagaaactgcaagtggatatttggtcctctctgaggatttcgttggaaacgggataaaccgcacagaactaaacagaagcattctcagagccctcttcgtgatgtttgcattcaactcacagtgctgaacctttctttgatagtgcagctttgaaacactctttttgtagaaactgcaagtggatgtttggtcctctctgaggatttcgttggaaacgggataaaccgcacagaactaaaacagaagcattgtcagaaacttctttgtgatgattgcattcaactcacagagttgaaggttccttttcaaacagcagtttccaatcactctttctgtggaatctgcaagtggatatttgggcctctctgaggatttcgttggaaacgggataaaacgcacagaactaaaacagaagcattctcagaaacttctctgtgatgtttgtgttcaactcccagagtttcacgttgcttttcatagagtagttctgaaacatgcttttcgtagtgtctgcaagtggacatttggagcgctttcaggcctgtggtggaaaacgaattatggtcacataaaaactggagagaagccttctcagaaacttctctgtgatgattgcattcaactcacagagttgaaccctcctatggatagagcagtgttgaaactctctttttgtggaatctgcaagtggatatgtggacctctccgaagatgtctttggaaacgggaatatcttcacataaaaactaaacagaagcattctcagaaacttcttggtgatgtttgcattcaaatcccagagttgaaccttcctttgatagttcaggtttgaaacactctttctgtaggatctgcaagtggctatttggaccactctgtggccttcgttcgaaacgggtatatcttcgcataaaatctagacagaagcattctcagaaaatactttgtgatgattgagtttaaatcacagagctgaccattcctttggatggagcaggtttgagacacactttttgtagaatctacaagtggatatttggacctctctgaggatttcgttggaaacgggataactgcacctaactaaacggaagcattctcagaaactgctttgtgatgattgtattcacctcacagagttgaacattcctattgatagagcagtttggaaacactcttgttgtggaatgtgcaagtggagatttggagcgctttgaggcctatggtagtaaagggaatagcttcatagaaaaactagacagatgcattctcaggaactttttggtgatgtttgtattcaactcccagagttgaactttcctttggaaagagcagctatgaaacactctttttctagaatctgcaagtggacgtttggagggctttgtggtttgtggtggaaaaggaaatatcttcacctaaatactagacagaagcattctcagaagcttctctgtgatgactgcattcaactcacggagttgaacactccttttgagagcgcagttttgaaactctctttctgtggcatctgcaaggggacatgtagacctctttgaagatttcgttggaaacggaatcatcttcacataaaaactatacagaagcagtctcagaatcttctttgtgatgtttgcattcaaatcccagagttgaactttcctttcaaagttcacgtttgaaacactctttttgcaggatctacaagtggatatttggaccactctgtgtccttcgttcgaaacgggtatatcttcacacgacatctagacagaagctttctcagaaaattctttgggatgattgagtggaactcacagagctgaacattccttgcgatgtagcagtttagaaacacactttctgcagaatctgcaagtgcatatttggacctctctgaggaattcgttggaaacgggataatttcagctgactaaacagaagcattctcagaaccttcttcgtgatgtctgcattcaactcacagtgtggaacctttctttgatagttcaggtttgaaacactctttttgtagaaactgcaaggggataattgcacttctttgaggcctaccgtagtaaaggaaataacttcctatagaaagaagacagaagcattctcagaaccctcttcgtgatgtttgcattcaactcacagtgctgaacctttctttgatagttcagctttgaaacactcttcttgtagaaactgcaagtggatatttggtcctctctgaggatttcgttggaaacgggataaaccgcacagaactaaacagaagcattctcagaaccttcttcgtgatgtttgcattcaactcacagtgttgaacctttctttgatagttcaggttggaaacggtctttctgtagaaactgcaagtagatatttggacctctctgaggatttcgttggaaacgggataaaccgcacagaactaaaacagaagcattcacagaaaactcttggtgacgactgagtttaactcacagagctgaacattcctttggatggagcagtttcgaaacacactatttgtagaatgtgcaagtggatatttgggcctctctgaggatttcgttggaaacgggataaaccgcacagaactaaacagaagcattctcagaaactactttgtgatgattgcattcaagtcacagagttgaacattccctttgacagagcagtttggaaactctctttgtgtagaatctgcaagtggagatatggaccgctttgaggcctatggtagtaaaggaaataccttcatataaaagctagagagtagcattctcagaaacttctttgtgatgcttgcattcaactcatagagttgaactttcctttcgagagagaagctttgaaacactctttttccagaatctgcaagtggaaatttggagggctttgaggcctgtggtggaaaaggaattatcttcctgtaaaagctagatagaagcattgtcagaaacttctttgtgatgattgcattcaactcacagagttgaaggttccttttcaaagagcagtttcaaatcactctttccgtggaatctgcaagtggatatttggacctctttgaagatttcgttggaaacgggagaatcttcacagaaaagctaaacagaagcattctcagaaacttctctgtgatgtttgagttcaactcccagaatttcacattgcttttcatagagtagttctgaaacatgcttttcgtactgtctacaagtggacatttggagcgctttcaggcctgtggtggaaaacgaattatggtcacataaaaactggagagaagccttctcagaaacttctctgtgatgattgcattcaactcacagagttgaaccctcctatggatagagcagtgttgaaactctctttttgtggaatctgcaagtggatatgtggacctctccgaagatgtctttggaaatgggaatatcttcacataaaaactaaacagaagcattctcagaaacttcttggtgatgtttgcattcaaatcccagagttgaaccttcctttgatagttcaggtttgaaacactctttttgtaggatctgcaagtggatatttggaccactctgtggtcttcgttcgaaacgggtacatcttcgcataaaatctagacagaagcattctcagaaaatactttgtgatgattgagttgaactcacagagctgaacattcctttggatggagcaggtttgagacacactttttgtagaatctacaagtggatatttggaccgctctgaggatttcgttggaaacgggataactgcacctaactaaacggaagcattctcagaaactgctttgtgatgattgcattcacctcacagagttgaacattcctattgatagagcagtttggaaacactcttgttgtggaatgtgcaagtggagatttggagcgctttgaggcctatggtagtaaagggaatagcttcaaagaaaaactagacagatgcattctcaggaactttttggtgatgtttgtattcaactcccagagttgaactttcctttggaaagagcagctatgaaacaatctttttctagaatctgcaagtggacgtttggagggctttgtggtttgtggtggaaaaggaaatatcttcacctaaatactagatagaagcattctcagaagcttctctgtgatgactgcattcaactcacggagttgaacactccttttgagagcgcagttttgaaactctctttctgtggcatctgcaaggggacatgtagacctctttgaagatttcgttggaaacggaatcatcttcacatcaaaactatacagaagcagtctcagaatcttctttgtgatgtttgcattcaaatcccagagttgaactttcctttccaagttcacgtttgaaacactctttttgcaggatctgcaagtggatatttggaccactctgtgtccttcgttcgaaacgggtatatcttcacatgacatctagacagaagctttctcagaaaattctttgggatgattgagttgagcaaacagagctgaacactccttgcgatgtagcagtttagaaacacactttctgcagaatctgcaagtgcatatgtggacctctctgaggaaatcgttggaaacgggataatttcagctgactaaacagaagcattctcagaaccttcttcgtgatgtctgcattcaactcacagtgtggaacctttctttgacagttcaggtttgaaacactctttttgtagaaactgcaaggggatcattgcacttctttgaggcctaccgtagtaaaggagataacttcctataaaaagaagacagaagcattctcagaaccctcttcgtgatgtttgcattcaactcacggtgctgaatctttctttgatagttcagctttgaaacactctttttgtagaaactgcaagtggatattttgtcctctctgaggatttcgttggtaacgggataaaccgcacagaactaaacagaagcattctcagaaccttcttcgtgatgtttgcattcaactcacagtgttgaacctttctttgatagttcaggtttgaaacggtctttctgtagaaactgcaagtagatatttggacctctctgaggatttcgttggaaacgggataaaccgcacacaactaaaacagaagcattcacagaaaactcttggtgacgactgagtttaactcacagagctgaacattcctttggatggagcagtttcgaaacacactatctgtagaatgtgcaagtggatatgtgggcctctctgaggatttcgttggaaacgggataaaccgcacagaactaaacagaagcattctcagaaactactttgtgatgattgcattcaagtcacagagttgaacattccctttgacagagcagtttggaaactctctttgtgtagaatctgcaagtggagatatggaccgctttgaggcctatggtagtaaaggaaatagcttcatataaaagctagacagtagcattctcagaaacttctttgtgatgcttgcattcaactcacagagttgaactttcctttcgagagagaagctttgaaacactctttttccagaatctgcaagtggacatttggagggctttgaggcctgtggtggaaaaggaattatcttcccgtaaaagctagatagaagcattgtcagaaacttctttgtgatgattgcattcaactcacagagttgaaggttccttttcaaagagcagtttccaatcactctttgtgtggaatctgcaagtggatatttggacctattttgaagatttcgttggaaacgggagaatcttcacaggaaagctaaacagaagcattctcagaaacttctctgtgatgtttgtgttcaactcccagagtttcacattgcttttcatagagtagttctgaaacatgcttttcgtagtgtctacaagtggacatttggagcgctttcaggcctgtggtggaaaacgaattatggtcacataaaaactggagagaagccttctcagaaacttctctgtgatgattgcattcaactcacagagttgaaccctcctatggatagagcagtgttgaaactctctttttgtggaatctgcaagtggatacgtggacctctccgaagatgtctttggaaacgggaatatcttcacataaaaactaaacagaagcattctcagaaacttcttggtgatgtttgcattcaaatcccagagttgaaccttcctttgatagttcaggtttgaaacactctttttgtaggatctgcaagtggatatttggaccactctgtggccttcgttcgaaacgggtatatcttcgcataaaatctagacagaagcattctcagaaaatactttgtgatgattgagtttaaatcacagagctgaccattcctttggatggagcaggtttgagacacactttttgtagaatctacaagtggatatttggacctctctgaggatttcgttggaaacgggagaactgcacctaactaaacggaagcattctcagaaactgctttgtgatgattgcattcacctcacagagttgaacattcctattgatagagcagtttggaaacactcttgttgtggaatgtgcaagtggagatttggagcgctttgaggcctatggtagtaaagggaatagcttcatagaaaaactagacagatgcattctcaggaactttttggtgatgtttgtattcaactcccagagttgaactttcctttggaaagagcagctatgaaacactgtttctctagaatctgcaagtggacgtttggagggctttgtggtttgtggtggaaaaggaaatatcttcacctaaatactagatagaagcatcctcagaagcttctctgtgatgactgcattcaactcacggagttgaacactccttttgagagcgcagttttgaaactctctttctgtggcatctgcaaggggacatgtagacctctttgaagatttcgttggaaacggaatcatcttcacagaaaaactatacagaagcagtctcagaatcttctttgtgatgtttgcattcaaatccccgagttgaactttcctttcaaagttcacgtttgaaacactctttttgcaggatctacaagtggatatttggaccactctgtgtccttcgttcgaaacgggtatatcttcacatgacatctagacagaagctttctcagaaaattctttgggatgattgagttgaactcacagagctgagcattccttgcgatgtagcagtttagaaacacactttctgcagaatctgcaagtgcatatttggacctctgtgaggaattcgttggaaacgggataatttcagctgactaaacagaagcattctcagaaccttcttcgtgatgtctgcattcaactcacagtgtggaacctttctttgatagttcaggtttgaaacactctttttgtagaaactgcaaggggataattgcactctttgaggagtaccgtagtaaaggaaataacttcctctaaaaagaagacagaagcattctcagaaccctcttcgtgatgtttgcattcaactcacagtgctgaacctttctttgatagttcagctttgaaacactctttttgtagaaactgcaagtggatatttggtcctctctgaggatttcgttgcaaacgggataaactgcacagaactaaacagaagcattctcagaaccttcttcgtgatgtttgcattcaactcacagtgttgaacctttctttgatagttcaggtttgaaacggtctttctgtagaaactgcaagtagatatttggacctctctgaggatttcgttggaaacgggataacccgcacagaactaaaacagaagcattcacagaaaactcttggtgacgactgagtttaactcacagagctgaacattcctttggatggagcagtttcgaaacacactatttgtagaatgtgcaagtggatatttaggcctctctgaggatttcgttggaaacgggataaaccgcacagaactaaacagaagcattctcagaaactactttgtgatgattgcattcaagtcacagagttgaacattccctttgacagagcagtttggaaactctctttgtgtagaatctgcaagtggagatatggaccgctttgaggcctatggtagtaaaggaaatagcttcatataaaagctagacagtagcattctcagaaacctctttgtgatgcttgcattcaactcacagagttgaactttcctttcgagagagaagctttgaaacactctttttccagaatctgcaagtggacatttggagggctttgaggcctgtggtggaaaaggaattatcttcccgtaaaagctagatagaagcattgtcagaaacttctttgtgatgattgcattcaactcacagagttgaaggttccttttcaaagagcagtttccaatcactctttctgtggaatctgcaagtggatatttggacctattttgaagatttcgttggaaacgggagaatcttcacaggaaagctaaacagaagcattctcagaaacttctctgtgatgtttgtgttcaactcccagagtttcacattgcttttcatagagtagttctgaaacatgcttttcgtagtgtctacaagtggacatttggagcgctttcaggcctgtggtggaaaacgaattatggtcacataaaaactggagagaagccttctcagaaacttctctgtgatgattgcattcaactcacagagttgaaccctcctatggatagagcagtgttgaaactctctttttgtggaatctgcaagtggatatgtggacctctccgaagatgtctttggaaacgggaatatcttcacataaaaactaaacagaagcattctcagaaacttcttggtgatgtttgcattcaaatcccagagttgaaccttcctttgatagttcaggtttgaaacactctttttgtaggatctgcaagtggatatttggaccactctgtggccttcgttcgaaacgggtatatcttcgcataaaatctagacagaagcattctcagaaaatactttgtgatgattgagtttaactcacagagctgaacattcctttggatggagcaggtttgagacacaccttttgtagaatctacaagtggatatttggacctctctgaggatttcgttggaaacgggataactgcacctaactaaacggaagcattctcagcaaactgctttgtgatgactgcattcacctcacagagttgaacattcctattgatagagcagtttggaaacactcttgttgtggaatgtgcaagtggagatttggagcgctttgaggcctatggtagtaaagggaatagcttcatagaaaaactagacagatgcattctcaggaactttttggtgatgtttgtattcaactcccagagttgaactttcctttggaaagagcagctatgaaacactctttttctagaatctgcaagtggacgtttggagggctttgtggtttgtggtggaaaaggaaatatcttcacctaaatactagatagaagcatcctcagaagcttctctgtgatgactgcattcaactcacggagttgaacactccttttgagagcgcagttttgaaactctctttctgtggcatctgcaaggggacatgtagacctctttgaagatttcgttggaaacggaatcatcttcacataaaaactatacagaagcagtctcagaatcttctttgtgatgtttgcattcaaatccccgagttgaactttcctttcaaagttcacgtttgaaacactctttttgcaggatctacaagtggatatttggaccactctgtgtccttcgttcgaaacgggtatatcttcacatgacatctagacagaagctttctcagaaaattctttgggatgattgagttgaactcacagagctgagcattccttgcgatgtagcagtttagaaacacactttctgcagaatctgcaagtgcatatttggacctctgtgaggaattcgttggaaacgggataatttcagctgactaaacagaagcattctcagaacttcttcgtgatgtctgcattcaactcacagtgtggaacctttctttgatagttcaggtttgaaacactctttctgtagaaactgcaaggggataattgcactctttgaggagtaccgtagtaaaggaaataacttcctataaaaagaagacagaagcattctcagaaccctcttcgtgatgtttgcattcaactcacagtgctgaacctttctttgatagttcagctttgaaacactcttcttgtagaaactgcaagtggatatttggtcctctgctgaggatttcgttggaaacgggataaaccgcacagaactaaacagaagaattctcagagccctcttcgtgatgtttgcattcaactcacagtgctgaacctttctttgatagtgcagctttgaaacactctttttgtagaaactgcaagtggatgtttggtcctctctgaggatttcgttggaaacgggataaaccgcacagaactaaaacagaagcattgtcagaaacttctttgtgatgattgcattcaactcacagagttgaaggttccttttcaaacagcagtttccaatcactctttctgtggaatctgcaagtggatatttgggcctctctgaggatttcgttggaaacgggataaaacgcacagaactaaaacagaagcattctcagaaacttctctgtgatgtttgtgttcaactcccagagtttcacgttgcttttcatagagtacttctgaaacatgcttttcgtagtgtctgcaagtggacatttggagcgctttcaggcctgtggtggaaaacgaattatggtcacataaaaactggagagaagccttctcagaaacttctctgtgatgattgcattcaactcacagagttgaaccctcctatggatagagcagtgttgaaactctctttttgtggaatctgcaagtggatatgtggacctctccgaagatgtctttggaaacgggaatatcttcacataaaaactaaacagaagcattctcagaaacttcttggtgatgtttgcattcaaatcccagagttgaaccttcctttgatagttcaggtttgaaacactctttctgtaggatctgcaagtggctatttggaccactctgtggccttcgttcgaaacgggtatatcttcgcataaaatctagacagaagcattctcagaaaatactttgtgatgattgagtttaaatcacagagctgaccattcctttggatggagcaggtttgagacacactttttgtagaatctacaagtggatatttggacctctctgaggatttcgttggaaacgggataactgcacctaactaaacggaagcattctcagaaactgctttgtgatgattgcattcacctcacagagttgaacattcctattgatagagcagtttggaaacactcttgttgtggaatgtgcaagtggagatttggagcgctttgaggcctatggtagtaaagggaatagcttcatagaaaaactagacagatgcattctcaggaactttttggtgatgtttgtattcaactcccagagttgaactttcctttggaaagagcagctatgaaacactctttttctagaatctgcaagtggacgtttggagggctttgtggtttgtggtggaaaaggaaatatcttcacctaaatactagatagaagcattctcagaagcttctctgtgatgactgcattcaactcacggagttgaacactccttttgagagcgcagttttgaaactctctttctgtggcatctgcaaggggacatgtagacctctttgaagatttcgttggaaacggaatcatcttcacataaaaactatacagaagcagtctcagaatcttctttgtgatgtttgcattcaaatcccagagttgaacttccctttcaaagttcacgtttgaaacactctttttgcaggatctacaagtggatatttggaccactctgtgtccttcgttcgaaacgggtatatcttcacatgacatctagacagaagctttctcagaaaatcctttgggatgattgagtggaactcacagagctgaacattccttgcgatgtagcagtttagaaacacactttctgcagaatctgcaagtgcatatgtggacctctctgaggaattcgttggaaacgggataatttcagctgactaaacagaagcattctcagaaccttcttcgtgatgtctgcattcaactcacagtgtggaacctttctttgatagttcaggtttgaaacactctttttgtagaaactgcaaggggataattgcacttctttgaggcctaccgtagtaaaggaaataacttcctatagaaagaagacagaagcattctcagaaccctcttcgtgatgtttgcattcaactcacagtgctgaacctttctttgatagttcagctttgaaacactcttcttgtagaaactgcaagtggatatttggtcctctctgaggatttcgttggaaacgggataaaccgcacagaactaaacagaagaattctcagagccctcttcgtgatgtttgcattcaactcacagtgctgaacctttctttgatagtgcagctttgaaacactctttttgtagaaactgcaagtggatgtttggtcctctctgaggatttcgttggaaacgggataaaccgcacagaactaaaacagaagcattgtcagaaacttctttgtgatgattgcattcaactcacagagttgaaggttccttttcaaacagcagtttccaatcactctttctgtggaatctgcaagtggatatttgggcctctctgaggatttcgttggaaacgggataaaacgcacagaactaaaacagagagcattctcagaaacttctctgtgatgtttgtgttcaactcccagagtttcacgttgcttttcatagagtagttctgaaacatgcttttcgtagtgtctgcaagtggacatttggagcgctttcaggcctgtggtggaaaacgaattatggtcacataaaaactggagagagctttctcagaaacttctctgtgatgattgcattcaactcacagagttgaaccctcctatggatagagcagtgttgaaactctctttttgtggaatctgcaagtggatatgtggacctctccgaagatgtctttggaaacgggaatatcttcacataataactaaacggaagcattctcagaaacttcttggtgatgtttgcattcaaatcccagagttgaaccttcctttgacagttcaggtttgaaacactctttttgtaggatctgcaagtggatatttggaccactctgtggccttcgttcgaaacgggtacatcttcgcataaaatctagacagaagcattctcagaaaatactttgtgatgattgagttgaactcacagagctgaacattcctttggatggagcaggtttgagacacactttttgtagaatctacaagtggatatttggacctctctgaggatttcgttggaaacgggataactgcacctaactaaacggaagcattctcagaaactgctttgtgatgattgcattcacctcacagagttgaacattcctattgatagagcagtttggaaacactcttgttgtggaatgtgcaagtggagatttggagcgctttgaggcctatggtagtaaagggaatagcttcatagaaaaactagacagatgcattctcaggaactttttggtgatgtttgtattcaactcccagagttgaactttcctttggaaagagcagctatgaaacactctttttctagaatctgcaagtggacgtttggagggctttgtggtttgtggtggaaaaggaaatatcttcacctaaatactagagagaagcattctcagaagcttctctgtgatgactgcattcaactcacggggttgaacactccttttgggagcgcagttttgaaactctctttctgtggcatctgcaaggggacatgtagacctctttgaagatttcgttggaaacggaatcatcttcacatcaaaactatacagaagcagtctcagaatcttctttgtgatgtttgcattcaaatcccagagttgaactttcctttcaaagttcacgtttgaaacactctttttgcaggatctacaagtggatatttggaccactctgtgtccttcgttcgaaacgggtatatcttcacatgacatctagacagaagctttctcagaaaattgtttgggatgattgatttgaactcacagagctgagcattccttgcgatgtagcagtttagaaacacactttctgcagaatctgcaagtgcatatttggacctctctgaggaattcgttggaaacgggataatttcagctgactaaacagaagtattctcagaaccttcttcgtgatgtctgcattcaactcacagtgtggaacctttctttgatagttcaggtttgaaacactctttttgtaggaactgcaaggggataattgcactctttgaggagtaccgtagtaaaggaaataacttcctataaaaagaagacagaagcattgtcagaaccctcttcgtgatgtttgcattcaactcacagtgctgaacctttctttgatagttcagctttgaaacactctttttgtagaaactgcaaatggatatttggtcctctctgaggatttcgttggaaaagggataaaacgcacagaactaaacagatagcattcacagaaactcttggtgacgactgagtttaactcacagagctgaacattcctttggatggagcagtttcaaaacacactatttgtagaatctgcaagtggatatgtgggcctctctgaggatttcgttggaaacgggataaaccgcacagaactaaaacagagcattctgagaaactactttgtgatgattgcattcaagtcacagagctgaacattctctttgacagagtagtttggaaactctctttgtgtagaatctgcaagtggagatatggaatgctttgaggactatggtagtaaaggaaatagcttcatataaaagctagacagtagcattctcagaaacttctttgtgatgcttgcattcaactcacagatttgaactttcctttcgagagagaagctttgaaacactctttttccagaatctgcaagtggacatttggagggctttgaggcctgtggtggaaaaggaattatcttcctgtaaaagctggatagaagcattgtcagaaacttctttgtgatgattgcattcaactcacagagttgaaggttccttttcaaagagcagtttccaatcactctttgtgtggaatctgcaagtggatatttggacctattttgaagatttcgttggaaacgggagaatcttcacaggaaagctaaacagaagcattctcagaaacttctctgtgatgtttgtgttcaactcccagagtttcacattgcttttcatagagtagttctgaaacatgcttttcgtagtgtctacaagtggacatttggagcgctttcaggcctgtggtggaaaacgaattatggtcacataaaaactggagagaagccttctcagaaacttctctgtgatgattgcattcaactcacagagttgaaccctcctatggatagagcagtgttgaaactctctttttgtggaatctgcaagtggatatgtggacctctccgaagatgtctttggaaacgggaatatcttcacataaaaacttaacagaagcattctcagaaacttcttggtgatgtttgcattcaaatcccagagttgaaccttcctttgatagttcaggtttgaaacactctttttgtaggatctgcaagtggatatttggaccactctgtggccttcgttcgaaacgggtacatcttcgcataaaatctagacagaagcattctcagaaaatactttgtgatgattgagttgaactcacagagctgaacattcctttggatggagcaggtttgagacacactttttgtagaatctacaagtggatatttggacctctctgaggatttcgttggaaacgggataactgcacctaactaaacggaagcattctcagaaactgctttgtgatgattgcattcacctcacagagttgaacattcctattgatagagcagtttggaaacactcttgttgtggaatgtgcaagtggagatttggagcgctttgaggcctatggtagtaaagggaatagcttcatagaaaaactagacagatgcattctcaggaactttttggtgatgtttgtattcaactcccagagttgaactttcctttggaaagagcagctatgaaacactctttttctagaatctgcaagtggacgtttggagggctttgtggtttgtggtggaaaaggaaatatcttcacctaaatactagatagaagcattctcagaagcttctctgtgatgactgcattcaactcacggagttgaacactccttttgagagcgcagttttgaaactctctttctgtggcatctgcaagaggacatgtagacctctttgaagatttcgttggaaatggaatcatcttcacaaaaaaactatacagaaacagtctcagaatcttctttgtgatgtttgcattcaaatcccagagttgaactttcctttcaaagttcacgtttgaaacactctttttgcaggatctacaagtggatatttggaccactctgtgtccttcgttcgaaacgggtatatcttcacatgacatctagacagaagctttctcagaaaattctttccgatgattgagttgagcaaacagagctgaacactccttgcgatgtagcagtttagaaacacactttctgcaggatctgcaagtgcatatgtggacctctctgaggaattcattggaaacgggataatttcagctgactaaacagaagcattctcagaaccttcttcgtgatgtctgcattcaactcacagtgtggaacctttctttgatagttcaggtttgaaacactctttttgtagaaactgcaaggggataattgcacttctttgaggcctaccgtagtaaaggaaataacttcctatagaaagaagacagaagcattctcagaaccctcttcgtgatgtttgcattcaactcacagtgctgaacctttctttgatagttcagctttgaaacactgttcttgtagaaactgtaagtggatatttggtcctctctgaggatttcgttggaaacgggataatccgcacagaactaaacagaagcattctcagaaccctcttcgtgatgtttgcattcaactcacagtgctgaacctttctttgatagtgcagctttgaaacactctttttgtagaaactgcaagtggatatttggtcctctctgaggatttcgttggaaacgggataaatcccacagaactaaaacagaagcattctcagaaccttcttcgtgatgtttgcattcaactcacagtgttgaacctttctttgatagttcaggtttgaaacggtctttctgtagaaactgcaagtagatatttggacctctctgaggatttcgttggaaacgggataaaccgcacagaactaaacagaagcattcacagaaaactcttggtgacgaccgagtttaactcacagagctgaacattcctttgaatggagcagtttcgaaacacactatttgtagaatgtgcaagtggatatttgggcctctctgaggatttcgttggaaacgggataaaccgcacagaactaaacagaagcattctcagaaactactttgtgatgattgcattcaagtcacagagttgaacattccctttgacagagcagtttggaaactctctttgtgtagaatctgcaagtggagatatggaccgctttgaggcctatggtagtaaaggaaatagattcatataaaagctagacagtagcattctcagaaacttctttgtgatgcttgcattcaactcacagagttgaactttcctttcgagagagaagctttgaaacactctttttccagaatctgcaagtggacatttggagggctttgaggcctgtggtggaaaaggaattatcttcccgtaaaagctagatagaagcattgtcagaaacttctttgtgatgattgcattcaactcacagagttgaaggttccttttcaaagagcagtttccaatcactctttctgtggaatctgcaagtggatatttggacctattttgaagatttcgttggaaatgggagaatcttcacaggaaagctaaacagaagcattctcagaaacttctctgtgatgtttgtgttcaactcccagagtttcacattgcttttcatagagtagttctgaaacatgcttttcgtagtgtctacaagtggacatttggagcgctttcaggcctgtggtggaaaacgaattatggtcacataaaaactggagagaagccttctcagaaacttctctgtgatgattgcattcaactcacagagttgaaccctcctatggatagagcagtgttgaaactctctttttgtggaatctgcaagtggatatgtggacctctccgaagatgtctttggaaacgggaatatcttcacataaaaactaaacagaagcattctcagaaacttcttggtgatgtttgcattcaaatcccagagttgaaccttcctttgatagttcaggtttgaaacactctttttgtaggatctgcaagtggatatttggaccactctgtggccttcgttcgaaacgggtatatcttcgcataaaatctagacagaagcattctcagaaaatactttgtgatgattgagtttaactcacagagctgaacattcctttggatggagcaggtttgagtcacactttttgtagaatctacaagtggatatttggacctctctgaggatttcgttggaaacgcgataactgcacctaactaaacggaagcattctcagaaactgctttgtgatgattgcattcacctcacagagttgaacattcctattgatagagcagtttggaaacactcttgttgtggaatgtgcaagtggagatttggagcgctttgaggcctatggaagtaaagggaatagcttcatagaaaaacaaggcagatgcattctcaggaactttttggtgatgtttgtattcaactcccagagttgaactttcctttggaaagagcagctatgaaacactctttttctagaatctgcaagtggacgtttggagggctttgtggtttgtggtggaaaaggaaatatcttcacctaaatactagatagaagcatcctcagaagcttctctgtgatgactgcattcaactcacagagttgaacactccttttgagagcgcagttttgaaactctctttctgtggcatctgcaaggggacatgtagacctctttgaagatttcgttggaaacggaatcatcttcacataaaaactatacagaagcagtctcagaatcttctttgtgatgtttgcattcaaatccccgagttgaactttcctttcaaagttcacgtttgaaacactctttttgcaggatctacaagtggatatttggaccactctgtgtccttcgttcgaaacgggtatatcttcacatgacatctagacagaagctttctcagaaaattctttgggatgattgagttgaactcacagagctgagcattccttgcgatgtagcagtttagaaacacactttctgcagaatctgcaagtgcatatttggacctctgtgaggaattcgttggaaacgggataatttcagctgactaaacagaagcattctcagaaccttcttcgtgatgtctgcattcaactcacagtgtggaacctttctttgatagttcaggtttgaaacactctttttgtagaaactgcaaggggataattgcactctttgaggagtaccatagtaaaggaaataacttcctataaaaagaagacagaagcattctcagaaccctcttcgtgatgtttgcattcaactcacagtgctgaacctttctttgatagttcagctttgaaacactctttttgtagaaactgcaagtggatatttggtcctctctgagcatttcgttggaaacgggataaactgcacagaactaaacagaagcattctcagaaccttcttcgtgatgtttgcattcaactcacagtgttgaacctttctttgatagttcaggtttgaaacggtctttctgtagaaactgcaagtagatatttggacctctctgaggatttcgttggaaacgggataacccgcacagaactaaaacagaagcattcacagaaaactcttggtgacgactgagtttaactcacagagctgaacattcctttggatggagcagtttcgaaacacactatttgtagaatgtgcaagtggatatttaggcctctctgaggatttcgttggaaacgggataaaccgcacagaactaaacagaagcattctcagaaactactttgtgatgattgcattcaagtcacagagttgaacattccctttgacagagcagtttggaaactctctttgtgtagaatctgcaagtggagatatggaccgctttgaggcctatggtagtaaaggaaatagcttcatataaaagctagacagtagcattctcagaaacttctttgtgatgcttgcattcaactcacagagttgaactttcctttcgagagagaagctttgaaacactctttttccagaatctgcaagtggacatttggagggctttgaggcctgtggtggaaaaggaattatcttcccgtaaaagctagatagaagcattgtcagaaacttctttgtgatgattgcattcaactcacagagttgaaggttccttttcaaagagcagtttccaatcactctttctgtggaatctgcaagtggatatttggacctattttgaagatttcgttggaaacgggagaatcttcacaggaaagctaaacagaagcattctcagaaacttctctgtgatgtttgtgttcaactcccagagtttcacattgcttttcatagagtagttctgaaacatgcttttcgtagtgtctacaagtggacatttggagcgctttcaggcctgtggtggaaaacgaattatggtcacataaaaactggagagaagccttctcagaaacttctctgtgatgattgcattcaactcacagagttgaaccctcctatggatagagcagtgttgaaactctctttttgtggaatctgcaagtggatatgtggacctctccgaagatgtctttggaaacgggaatatcttcacataaaaactaaacagaagcattctcagaaacttcttggtgatgtttgcattcaaatcccagagttgaaccttcctttgatagttcaggtttgaaacactctttttgtaggatctgcaagtggatatttggaccactctgtggccttcgttcgaaatgggtatatcttcgcataaaatctagacagaagcattctcagaaaatactttgtgatgattgagtttaaatcacagagctgaccattcctttggatggagcaggtttgagacacactttttgtagaatctacaagtggatatttggacctctctgaggatttcgttggaaacgggataactgcacctaactaaacggaagcattctcagaaactgctttgtgatgattgcattcacctcacagagttgaacattcctattgatagagcagtttggaaacactcttgttgtggaatgtgcaagtggagatttggagcgctttgaggcctatggtagtaaagggaatagcttcatagaaaaactagacagatgcattctcaggaaccttttggtgatgtttgtattcaactcccagagttgaactttcctttggaaagagcagctatgaaacactctttttctagaatctgcaagtggacgtttggagggctttgtggtttgtggtggaaaaggaaatatcttcacctaaatactagatagaagcattctcagaagcttctctgtgatgactgcattcaactcacggagttgaacactccttttgagagcgcagttttgaaactctctttctgtggcatctgcaaggggacatgtagacctctttgaagatttcgttggaaacggaatcatcttcacataaaaactatacagaagcagtctcagaatcttctttgtgatgtttgcattcaaatcccagagttgaactttcctttcaaagttcacgtttgaaacactctttttgcaggatctacaagtggatatttggaccactctgtgtccttcgttcgaaacgggtatatcttcacacgacatctagacagaagctttctcagaaaattctttgggatgattgagtggaactcacagagctgaacattccttgcgatgtagcagtttagaaacacactttctgcagaatctgcaagtgcatatttggacctctctgaggaattcgttggaaacgggataatttcagctgactaaacagaagcattctcagaaccttcttcgtgatgtctgcattcaactcacagtgtggaacctttctttgatagttcaggtttgaaacactctttttgtagaaactgcaaggggataattgcacttctttgaggcctaccgtagtaaaggaaataacttcctatagaaagaagacagaagcattcttcagaaccctcttcgtgatgtttgcattcaactcacagtgctgaacctttctttgatagttcagctttgaaacactcttcttgtagaaactgcaagtggatatttggtcctctctgaggatttcgttggaaacgggataaaccgcacagaactaaacagaagaattctcagagccctcttcgtgatgtttgcattcaactcacagtgctgaacctttctttgatagtgcagctttgaaacactctttttgtagaaactgcaagtggatgtttggtcctctctgaggatttcgttggaaacgggataaaccgcacagaactaaaacagaagcattgtcagaaacttctttgtgatgattgcattcaactcacagagttgaaggttccttttcaaacagcagtttccaatcactctttctgtggaatctgcaagtggatatttgggcctctctgaggatttcgttggaaacgggataaaacgcacagaactaaaacagaagcattctcagaaacttctctgtgatgtttgtgttcaactcccagagtttcacgttgcttttcatagagtagttctgaaacatgcttttcgtagtgtctgcaagtggacatttggagcgctttcaggcctgtggtggaaaacgaattatggtcacataaaaactggagagaagccttctcagaaacttctctgtgatgattgcattcaactcacagagttgaaccctcctatggatagagcagtgttgaaactctctttttgtggaatctgcaagtggatatgtggacctctccgaagatgtctttggaaacgggtatatcttcacataaaaactaaacagaagcattctcagaaacttcttggtgatgtttgcattcaaatcccagagttgaaccttcctttgatagttcaggtttgaaacactctttctgtaggatctgcaagtggctatttggaccactctgtggccttcgttcgaaacgggtatatcttcgcataaaatctagacagaagcattctcagaaaatactttgtgatgattgagtttaaatcacagagctgaccattcctttggatggagcaggtttgagacacactttttgtagaatctacaagtggatatttggacctctctgaggatttcgttggaaacgggataactgcacctaactaaacggaagcattctcagaaactgctttgtgatgattgcattcacctcacagagttgaacattcctattgatagagcagtttggaaacactcttgttgtggaatgtgcaagtggagatttggagcgctttgaggcctatggtagtaaagggaatagcttcatagaaaaactagacagatgcattctcaggaaccttttggtgatgtttgtattcaactcccagagttgaactttcctttggaaagagcagctatgaaacactctttttctagaatctgcaagtggacgtttggagggctttgtggtttgtggtggaaaaggaaatatcttcacctaaatactagatagaagcattctcagaagcttctctgtgatgactgcattcaactcacggagttgaacactccttttgagagcgcagttttgaaactctctttctgtggcatctgcaaggggacatgtagacctctttgaagatttcgttggaaacggaatatcttcacataaaaactatacagaagcagtctcagaatcttctttgtgatgtttgcattcaaatcccagagttgaactttcctttcaaagttcacgtttgaaacactctttttgcaggatctacaagtggatatttggaccactctgtgtccttcgttcgaaacgggtatatcttcacaggacatctagacagaagctttctcagaaaattctttgggatgattgagtggaactcacagagctgaacattccttgcgatgtagcagtttagaaacacactttctgcagaatctgcaagtgcatatttggacctctctgaggaattcgttggaaacgggataatttcagctgactaaacagaagcattctcagaaccttcttcgtgatgtctgcattcaactcacagtgtggaacctttctttgatagttcaggtttgaaacactctttttgtagaaactgcaaggggataattgcacttctttgaggcctaccgtagtaaaggaaataacttcctatagaaagaagacagaagcattctcagaaccctcttcgtgatgtttgcattcaactcacagtgctgaacctttctttgatagttcagctttgaaacactcttcttgtagaaactgcaagtggatatttggtcctctctgaggatttcgttggaaacgggataaaccgcacagaactaaacagaagaattctcagagccctcttcgtgatgtttgcattcaactcacagtgctgaacctttctttgatagtgcagctttgaaacactctttttgtagaaactgcaagtggatgtttggtcctctctgaggatttcgttggaaacgggataaaccgcacagaactaaaacagaagcattgtcagaaacttctttgtgatgattgcattcaactcacagagttgaaggttccttttcaaacagcagtttccaatcactctttctgtggaatctgcaagtggatatttgggcctctctgaggatttcgttggaaacgggataaaacgcacagaactaaaacagaagcattctcagaaacttctctgtgatgtttgtgttcaactcccagagtttcacgttgcttttcatagagtagttctgaaacatgcttttcgtagtgtctgcaagtggacatttggagcgctttcaggcctgtggtggaaaacgaattatggtcacataaaaactggagagaagccttctcagaaacttctctgtgatgattgcattcaactcacagagttgaaccctcctatggatagagcagtgttgaaactctctttttgtggaatctgcaagtggatatgtggacctctccgaagatgtctttggaaacgggaatatcttcacataaaaactaaacagaagcattctcagaaacttcttggtgatgtttgcattcaaatcccagagttgaaccttcctttgatagttcaggtttgaaacactctttctgtaggatctgcaagtggctatttggaccactctgtggccttcgttcgaaacgggtatatcttcgcataaaatctagacagaagcattctcagaaaatactttgtgatgattgagttgaactcacagagctgaacattcctttggatggagcaggtttgagacacactttttgtagaatctgcaagtggatattgggacctctctgaggatttcgttggaaacgggataactgcacgtaactaaacggaagcattctcagaaactgctttgtgatgattgcattcacctcacagagttgaacattcctattgatagagcagtttggaaacactcttgttgtggaatgtgcaagtggagatttggagcgctttgaggcctatggtagtaaagggaatagcttcatagaaaaactagacagatgcattctcaggaactttttggtgatgtttgtattcaactcccagagttgaactttcctttggaaagagcagctatgaaacactctttttctagaatctgcaagtggacgtttggagggctttgtggtttgtggtggaaaaggaaatatcttcacctaaatactagatagaagcattctcagaagcttctctgtgatgactgcattcaactcacggagttgaacactccttttgagagtgcagttttgaaactctctttctgtggcatctgcaaggggataagtagacctctttgaagatttcgttggaaacggaatcatcttcacataaaaactatacagaagcagtctcagaatcttctttgtgatgtttgcattcaaatccccgagttgaactttcctttcaaagttcacgtttgaaacactctttttgcaggatctacaagtggatatttggaccactctgtgtccttcgttcgaaacgggtatatcttcacatgacatctagacagaagctttctcagaaaattctttgggatgattgagttgaactcacagagctgagcattccttgcgatgtagcagtttagaaacacactttctgcagaatctgcaagtgcatatttggacctctgtgaggaattcgttggaaacgggataatttcagctgactaaacagaagcattctcagaaccttcttcgtgatgtctgcattcaactcacagtgtggaacctttctttgatagttcaggtttgaaacactctttctgtagaaactgcaaggggatcattgcactctttgaggagtaccgtagtaaaggaaataacttcctataaaaagaagacagaagcattctcagaaccctcttcgtgatgtttgcattcaactcacagtgctgaacctttctttgatagttcagctttgaaacactctttttgtagaaactgcaagtggatatttggtcctctctgagcatttcgttggaaacgggataaactgcacagaactaaacagaagcattctcagaaccttcttcgtgatgtttgcattcaactcacagtgttgaacctttctttgatagttcaggtttgaaacggtctttctgtagaaactgcaagtagatatttggacctctctgaggatttcgttggaaacgggataacccgcacagaactaaaacagaagcattcacagaaaactcttggtgacgactgagtttaactcacagagctgaacattcctttggatggagcagtttcgaaacacactatttgtagaatgtgcaagtggatatttaggcctctctgaggatttcgttggaaacgggataaaccgcacagaactaaacagaagcattctcagaaactactttgtgatgattgcattcaagtcacagagttgaacattccctttgacagagcagtttggaaactctctttgtgtagaatctgcaagtggagatatggaccgctttgaggcctatggtagtaaaggaaatagcttcatataaaagctagacagtagcattctcagaaacttctttgtgatgcttgcattcaactcacagagttgaactttcctttcgagagagaagctttgaaacactctttttccagaatctgcaagtggacatttggagggctttgaggcctgtggtggaaaaggaattatcttcccgtaaaagctagatagaagcattgtcagaaacttctttgtgatgattgcattcaagtcacagagttgaaggttccttttcaaagagcagtttccaatcactctttctgtggaatctgcaagtggatatttggacctctttgaagatttcgttggaaacgggagaatcttcacagaaaagctaaacagaagcattctcagaaacttctctgtgatgtttgtgttcaactcccagagtttcacattgcttctcatagagtagttctgaaacatgcttttcgtagtgtctgcaagtggacatttggagggctttcaggcctgtggtggaaaacgaattatggtaacataaaaactggagagaagccttctcagaaacttctctgtgatgattgcattcaactcacagagttgaaccctcctatggatagagcagtgttgaaactctctttttgtggaatctgcaagcggatatgtggacctctccgaagatgtctttggaaacgggaatatcttcagataaaaactaaacagaagcattctcagaaacttcttggtgatgtttgcattcaaatcccagagttcaaccttcctttgatagttcaggtttgaaacacactttttgtaggatctgcaagtggatatttggaccactctgtggccttcgttcgaaacgggtacatcttcgcataaaatctagacagaagcattctcagaaaatactttgtgatgattgagtttaactcacagagctgaacattcctttggatggagcaggtttgagacacaccttttgtagaatctacaagtggatatttggacctctctgaggatttcgttggaaacgggataactgcacctaactaaacggaagcattctcagtaaactgctttgtgatgattgcattcacctcacagagttgaacattcctattgatagagcagtttggaaacactcttcttgtggaatgtgcaagtggagatttggagcgctttgaggcctatggtagtaaagggaatagcttcatagaaaaactagacagatgcattctcaggaactttttggtgatgtttgtattcaactcccagagttgaactttcctttggaaagagcagctatgaaacactctttttctagaatctgcaagtggacgtttggagggctttgtggtttgtggtggaaaaggaaatatcttcacctaaatactagatagaagcattctcagaagcttctctgtgatgactgcattcaactcacggagttgaacactccttttgagagcgcagttttgaaactctctttctgtggcatctgcaaggggacatgtagacctctttgaagatttctttggaaacggaatcatcttcacataaaaactatacagaagcagtctcagaatcttcttcgtgatgtttgcattcaaatcccagagttgaactttcctttcaaagttcacgtttgaaacactctttttgcaggatctacaagtggatatttggaccactctgtgtccttcgttcgaaacgggtatatcttcacatgacatctagacagaagctttctcagaaaattctttgggatgattgagtggaactcacagagctgaacattccttgcgatgtagcagtttagaaacacactttctgcagaatctgcaagtgcatatttggacctctctgaggaattcgttggaaacgggataatttcagctgactaaacagaagcattctcagaacttcttcgtgatgtctgcattcaactcacagtgtggaacctttctttgatagttcaggtttgaaacactctttttgtagaaactgcaaggggataattgcacttctttgaggcctaccgtagtaaaggaaataacttcctatagaaagaagacagaagaattctcagagccctcttcgtgatgtttgcattcaactcacagtgctgaacctttctttgatagtgcagctttgaaacactctttttgtagaaactgcaagtggatgtttggtcctctgctgaggatttcgttggaaacgggataaaccgcacagaactaaaacagaagcattctcagaaccttcttcgtgatgtttgcattcaactcacagtgtggaacctttctttgatagttcaggtttgaaacggtctttctgtagaaactgcaagtagatatttggacctctctgaggatttcgttggaaacgggataacccgcacagaactaaaacagaagcattcacagaaaactcttggtgacgactgagtttaactcacagagctgaacattcctttggatggagcagtttcgaaacacactatttgtagaatgtgcaagtggatatttgggcctctctgaggatttcgttggaaacgggataaaccgcacagaactaaacagaagcattctcagaaactactttgtgatgattgcattcaagtcacagagttgaacattccctttgacagagcagtttggaaactctctttgtgtaaaatctgcaagtggagatatggaccgctttgaggcctatggtagtaaaggaaatagcttcatataaaagctagacagtagcattctcagaaacttctttgtgatgcttgcattcaactcacagagttgaactttccttttgagagagaagctttgaaacactctttttccagaatctgcaagtggacatttggagggctttgaggcctgtggtggaaaaggaattatcttcccgtaaaagctagatagaagcattgtcagaaacttctttgtgatgattgcattcaactcacagagaatgaaggttcctttacaaacagcagtttccaaacactctttctgtggaatctgcaagtggatatttggacctctttgaagatttcgttggaaacgggagaatcttcacagaaaagctaaacagaagcattctcagaaacttctctgtgatgtttgtgttcaactcccagagtttcacattgcttttcatagagtagttctgaaacatgcttttcgtagtatctgcaagtggacatttggagcgctttcaggcctgtggtggaaaacgaattatggtcccataaaaactggagagaagccttctcagaaacttctctgtgatgattgcattcaactcacagagttgaaccctcctatggatagagcagtgttgaaactctctttttgtggaatctgcaagtggatatgtggacctctccgaagatgtctttggaaacgggaatatcttcacataaaaactaaacagaagcattctcagaaacttcttggtgatgtttgcattcaaatcccagagttgaaccttcctttgacagttcaggtttgaaacactctttttgtaggatctgcaagtggctatttggaccactctgtggccttcgttcgaaacgggtacatcttcgcataaaatctagacagaagcattctcagaaaatactttgtgatgattgagttgaactcacagagctgaacattcctttggatggagcaggtttgagacacactttttgtagaatctacaagtggatatttggacctctctgaggatttcgttggaaacgggataactgcacctaactaaacggaagcattctcagaaactgctttgtgacgattgcattcacctcacagagttgaacattcctattgatagagcagtttggaaacactcttgttgtggaatgtgcaagtggagatttggagcgctttgaggcctatggtagtaaagggaatagcttcatagaaaaactagacagatgcattctcaggaactttttggtgatgtttgtattcaactcccagagttgaactttcctttggaaagagcagctatgaaacactctttttctagaatctgcaagtggacgtttggagggctttgtggtttgtggtggaaaaggaaatatcttcacctaaatactagagagaagcattctcagaagcttctctgtgatgactgcattcaactcacggagttgaacactccttttgagagcgcagttttgaaactctctttctgtgacatccgcaaggggacatgtagacctctttgaagatttcgttggaaacggaatcatcttcacataaaaactatacagaagcagtctcagaatcttctttgtgatgtttgcattcaaatccccgagttgaactttcctttcaaagttcacgtttgaaacactctttttgcaggatctacaagtggatatttggaccactctgtgtccttcgttcgaaacgggtatatcttcacatgacatctagacagaagctttctcagaaaattctttgggatgattgagttgaactcacagagctgagcattccttgcgatgtagcagtttagaaacacactttctgcagaatctgcaagtgcatatttggacctctgtgaggaattcgttggaaacgggataatttcagctgactaaacagaagcattctcagaaccttcttcgtgatgtctgcattcaactcacagtgtggaacctttctttgatagttcaggtttgaaacactctttttgtagaaactgcaaggggataattgcactctttgaggagtaccgtagtaaaggaaataacttcctataaaaagaagacagaagcattctcagaaccctcttcgtgatgtttgcattcaactcacagtgctgaacctttctttgatagttcagctttgaaacactctttttgtagaaactgcaagtggatatttggtcctctctgaggatttcgttggaaacgggataaactgcacagaactaaacagaagcattctcagaaccttcttcgtgatgtttgcattcaactcacagtgttgaacctttctttgatagttcaggtttgaaacggtctttctgcagaaactgcaagtagatatttggaccgctctgaggatttcgttggaaacgggataacccgcacagaactaaaacagaagcattcacagaaaactcttggtgacgactgagtttaactcacagagctgaacattcctttggatggagcagtttcgaaacacactatttgtagaatgtgcaagtggatatttaggcctctctgaggatttcgttggaaacgggataaaccgcacagaactaaacagaagcattctcagaaactactttgtgatgattgcattcaagtcacagagttgaacattccctttgacagagcagtttggaaactctctttgtgtagaatctgcaagtggagatatggaccgctttgaggcctatggtagtaaaggaaatagcttcatataaaagctagacagtagcattctcagaaacttctttgtgatgcttgcattcaactcacagagttgaactttcctttcgagagagaagctttgaaacactctttttccagaatctgcaagtggacatttggagggctttgaggcctgtggtggaaaaggaattatcttcccgtaaaagctagatagaagcattgtcagaaacttctttgtgatgattgcattcaactcacagagttgaaggttccttttcaaagagcagtttccaatcactctttgtgtggaatctgcaagtggatatttggacctattttgaagatttcgttggaaacgggagaatcttcacaggaaagctaaacagaagcattctcagaaacttctctgtgatgtttgtgttcaactcccagagtttcacattgcttttcatagagtagttctgaaacatgcttttcgtagtgtctacaagtggacatttggagcgctttcaggcctgtggtggaaaacgaattatggtcacataaaaactggagagaagccttctcagaaacttctctgtgatgattgcattcaactcacagagttgaaccctcctatggatagagcagtgttgaaactctctttttgtggaatctgcaagtggatatgtggacctctccgaagatgtctttggaaacgggaatatcttcacataaaaactaaacagaagcattctcagaaacttcttggtgatgtttgcattcaaatcccagagttgaaccttcctttgatagttcaggtttgaaacactctttttgtaggatctgcaagtggatatttggaccactctgtggccttcgttcgaaacgggtatatcttcgcataaaatctagacagaagcattctcagaaaatactttgtgatgattgagtttaactcacagagctgaacattcctttggatggagcaggtttgagacacaccttttgtagaatctacaagtggatatttggacctctctgaggatttcgttggaaacgggataactgcacctaactaaacggaagcattctcagaaactgctttgtgatgattgcattcacctcacagagttgaacattcctattgatagagcagtttggaaacactcttgttgtggaatgtgcaagtggagatttggagcgctttgaggcctatggtagtaaagggaatagcttcatagaaaaactagacagatgcattctcaggaactttttggtgatgtttgtattcaactcccagagttgaactttcctttggaaagagcagctatgaaacactgtttttctagaatctgcaagtggacgtttggagggctttgtggtttgtggtggaaaaggaaatatcttcacctaaatactagatagaagcatcctcagaagcttctctgtgatgactgcattcaactcacgggagttgaacactccttttgagagcgcagttttgaaactctctttctgtggcatctgcaaggggacatgtagacctctttgaagatttcgttggaaacggaatcatcttcacataaaaactacacagaagcagtctcagaatcttctttgtgatgtttgcattcaaatccccgagttgaactttcctttcaaagttcacgtttgaaacactctttttgcaggatctacaagtggatatttggaccactctgtgtccttcgttcgaaacgggtatatcttcacatgacatctagacagaagctttctcagaaaattctttgggatgattgagttgaactcacagagctgagcattccttgcgatgtagcagtttagaaacacactttctgcagaatctgcaagtgcatatttggacctctgtgaggaattcgttggaaacgggataatttcagctgactaaacagaagcattctcagaaccttcttcgtgatgtctgcattcaactcacagtgtggaacctttctttgatagttcaggtttgaaacactctttttgtagaaactgcaaggggataattgcactctttgaggagtaccgtagtaaaggaaataacttcctataaaaagaagacagaagcattctcagaaccctcttcgtgatgtttgcattcaactcacagtgctgaacctttctttgatagttcagctttgaaacactctttttgtagaaactgcaagtggatatttggtcctctctgaggatttcgttggaaacgggataaactgcacagaactaaacagaagcattctcagaaccttcttcgtgatgtttgcattcaactcacagtgttgaacctttctttgatagttcaggtttgaaacggtctttctgtagaaactgcaagtagatatttggacctctctgaggatttcgttggaaacgggataacccgcacagaactaaaacagaagcattcacagaaaactcttggtgacgactgagtttaactcacagagctgaacattcctttggttggagcagtttcaaaacacactatttgtagaatgtgcaagtggatatttgggcctctctgaggatttcgctgtaaacgggataaaccgcacagaaataaacagaagcattctcagaaactactttgtgatgattgcattcaagtcacagagttgaacattccctttgacagagcagtttggaaactctctttgtgtagaatctgcaagtggagatatggaccgctttgaggcctatggtagtaaaggaaatagcttcatataaaagctagacagtagcattctcagaaacttctttgtgatgcttgcattcaactcacagagttgaactttcctttcgagagagaagctttgaaacactctttttccagaatctgcaagtggacatttggagggctttgaggcctgtggtggaaaaggaattatcttcccgtaaaagctagatagaagcattgtcagaaacttctttgtgatgattgcattcaactcacagagttgaaggttccttttcaaagagcagtttccaatcactctttctgtggaatctgcaagtggatatttggacctctttgaagatttcgttggaaacgggagaatcttcacagaaaagctaaacagaagcattctcagaaacttctctgtgatgtttgtgttcaactcccagaatttcagattgcctttcatagagtagttctgaaacatgcttttcgtagtgtctgcaagtggacatttggagcgctttcaggcctgtggtggaaaacgatttatggtcccataaaacctggagagaagccttctcagaaacttctctgtgatgattgcattcaactcacagagttgaaccctcctatggatagagcagtgttgaaactctctttttgtggaatctgcaagtggatatgtggacctctccgaagatgtctttggaaacgggaatatcttcacataaaaactaaacagaagcattctcagaaacttcttggtgatgtttgcattcaaatcccagagttgaaccttcctttgatagttcaggtttgaaacactctttttgtaggatctgcaagtggctatttggaccactctgtggccttcgttcgaaacgggtatatcttcgcataaaatctagacagaagcattctcagaaaatactttgtgatgattgagtttaaatcacagagctgaacattcctttggatggagcaggtttgagacacactttttgtagaatctacaagtggatatttggacctctctgaggatttcgttggaaacgggataactgcacctaactaaacggaagcattctcagaaactgctttgtgatgattgcattcacctcacagagttgaacattcctattgatagagcagtttggaaacactcttgttgtggaatgtgcaagtggagatttggagcgctttgaggcctatggtagtaaagggaatagcttcatagaaaaactagacagatgcattctcaggaactttttggtgatgtttgtattcaactcccagagttgaactttcctttggaaagagcagatatgaaacactctttttctagaatctgcaagtggacgtttggagggctttgtggtttgtggtggaaaaggaaatatcttcacctaaatactacatagaagcattctcagaagcttctctgtgatgactgcattcaactcacggagttgaacactccttttgagagcgcagttttgaaactctctttctgtggcatctgcaaggggacatgtagacctctttgaagatttcattggaaacggaatcatcttcacataaaaactatacagaagcagtctcagaatcttctttgtgatgtttgcattcaaatcccagagttgaactttcctttcaaagttcacgtttgaaacactctttttgcaggatctacaagtggatatttggaccactctgtgtccttcgttcgaaacgggtatatcttcacacgacatctagacagaagctttctcagaaaattctttgggatgattgagtggaactcacagagctgaacattccttgcgatgtagcagtttagaaacacactttctgcagaatctgcaagtgcatatttggacctctctgaggaattcgttggaaacgggataatttcagctgactaaacagaagcattctcagaaccttcttcgtgatgtctgcattcaactcacagtgtggaacctttctttgatagttcaggtttgaaacactctttttgtagaaactgcaaggggataattgcacttctttgaggcctaccgtagtaaaggaaataacttcctatagaaagaagacagaagcattctcagaaccctcttcgtgatgtttgcattcaactcacagtgctgaacctttctttgatagttcagctttgaaacactcttcttgtagaaactgcaagtggatatttggtcctctctgaggatttcgttggaaacgggataaaccgcacagaactaaacagaagaattctcagagccctcttcgtgatgtttgcattcaactcacaagtgctgaacctttctttgatagtgcagctttgaaacactctttttgtagaaactgcaagtggatgtttggtcctctctgaggatttcgttggaaacgggataaaccgcacagaactaaaacagaagcattgtcagaaacttctttgtgatgattgcattcaactcacagagttgaaggttccttttcaaacagcagtttccaatcactctttctgtggaatctgcaagtggatatttgggcctctctgaggatttcgttggaaacgggataaaacgcacagaactaaaacagaagcattctcagaaacttctctgtgatgtttgtgttcaactcccagagtttcacgttgcttttcatagagtagttctgaaacatgcttttcgtagtgtctgcaagtggacatttggagcgctttcaggcctgtggtggaaaacgaattatggtcacataaaaactggagagaagccttctcagaaacttctctgtgatgattgcattcaactcacagagttgaaccctcctatggatagagcagtgttgaaactctctttttgtggaatctgcaagtggatatgtggacctctccgaagatgtctttggaaacgggaatatcttcacataaaaactaaacagaagcattctcagaaacttcttggtgatgtttgcattcaaatcccagagttgaaccttcctttgatagttcaggtttgaaacactctttctgtaggatctgcaagtggctatttggaccactctgtggccttcgttcgaaacgggtatatcttcgcataaaatctagacagaagcattctcagaaaatactttgtgatgattgagtttaaatcacagagctgaccattcctttggatggagcaggtttgagacacactttttgtagaatctacaagtggatatttggacctctctgaggatttcgttggaaacgggataactgcacctaactaaacggaagcattctcagaaactgctttgtgatgattgcattcacctcacagagttgaacattcctattgatagagcagtttggaaacactcttgttgtggaatgtgcaagtggagatttggagcgctttgaggcctatggtagtaaagggaatagcttcatagaaaaactagacagatgcattctcaggaactttttggtgatgtttgtattcaactcccagagttgaactttcctttggaaagagcagctatgaaacactctttttctagaatctgcaagtggacgtttggagggctttgtggtttgtggtggaaaaggaaatatcttcacctaaatactagatagaagcattctcagaagcttctctgtgatgactgcattcaactcacggagttgaacactccttttgagagcgcagttttgaaactctctttctgtggcatctgcaaggggacatgtagacctctttgaagatttcgttggaaacggaatcatcttcacataaaaactatacagaagcagtctcagaatcttctttgtgatgtttgcattcaaatcccagagttgaactttcctttcaaagttcacgtttgaaacactctttttgcaggatctacaagtggatatttggaccactctgtgtccttcgttcgaaacgggtatatcttcacacgacatctagacagaagctttctcagaaaattctttgggatgattgagtggaactcacagagctgaacattccttgcgatgtagcagtttagaaacacactttctgcagaatctgcaagtgcatatttggacctctctgaggaattcgttggaaacgggataatttcagctgactaaacagaagcattctcagaaccttcttcgtgatgtctgcattcaactcacagtgtggaacctttctttgatagttcaggtttgaaacactctttttgtagaaactgcaaggggataattgcacttctttgaggcctaccgtagtaaaggaaataacttcctatagaaagaagacagaagcattctcagaaccctcttcgtgatgtttgcattcaactcacagtgctgaacctttctttgatagttcagctttgaaacactcttcttgtagaaactgcaagtggatatttggtcctctctgaggatttcgttggaaacgggataaaccgcacagaactaaacagaagaattctcagagccctcttcgtgatgtttgcattcaactcacagtgctgaacctttctttgatagtgcagctttgaaacactctttttgtagaaactgcaagtggatgtttggtcctctctgaggatttcgttggaaacgggataaaccgcacagaactaaaacagaagcattgtcagaaacttctttgtgatgattgcattcaactcacagagttgaaggttccttttcaaacagcagtttccaatcactctttctgtggaatctgcaagtggatatttgggcctctctgaggatttcgttggaaacgggataaaacgcacagaactaaaacagaagcattctcagaaacttctctgtgatgtttgtgttcaactcccagagtttcacgttgcttttcatagagtagttctgaaacatgcttttcgtagtgtctgcaagtggacatttggagcgctttcaggcctgtggtggaaaacgaattatggtcacataaaaactggagagaagccttctcagaaacttctctgtgatgattgcattcaactcacagagttgaaccctcctatggatagagcagtgttgaaactctctttttgtggaatctgcaagtggatatgtggacctctccgaagatgtctttggaaacgggaatatcttcacataaaaactaaacagaagcattctcagaaacttcttggtgatgtttgcattcaaatcccagagttgaaccttcctttgatagttcaggtttgaaacactctttctgtaggatctgcaagtggctatttggaccactctgtggccttcgttcgaaacgggtatatcttcgcataaaatctagacagaagcattctcagaaaatactttgtgatgattgagtttaaatcacagagctgaccattcctttggatggagcaggtttgagacacactttttgtagaatctacaagtggatatttggacctctctgaggatttcgttggaaacgggataactgcacctaactaaacggaagcattctcagaaactgctttgtgatggttgcattcacctcacagagttgaacattcctattgatagagcagtttggaaacactcttgttgtggaatgtgcaagtggagatttggagcgctttgaggcctatggtagtaaagggaatagcttcatagaaaaactagacagatgcattctcaggaaccttttggtgatgtttgtattcaactcccagagttgaactttcctttggaaagagcagctatgaaacactctttttctagaatctgcaagtggacgtttggagggctttgtggtttgtggtggaaaaggaaatatcttcacctaaatactagatagaagcattctcagaagcttctctgtgatgactgcattcaactcacggagttgaacactccttttgagagcgcagttttgaaactctctttctgtggcatctgcaaggggacatgtagacctctttgaagatttcgttggaaacggaatcatcttcacataaaaactatacagaagcagtctcagaatcttctttgtgatgtttgcattcaaatcccagagttgaactttcctttcaaagttcacgtttgaaacactctttttgcaggatctacaagtggatatttggaccactctgtgtccttcgttcgaaacgggtatatcttcacacgacatctagacagaagctttctcagaaaattctttgggatgattgagtggaactcacagagctgaacattccttgcgatgtagcagtttagaaacacactttctgcagaatctgcaagtgcatatttggacctctctgaggaattcgttggaaacgggataatttcagctgactaaacagaagcattctcagaaccttcttcgtgatgtctgcattcaactcacagtgtggaacctttctttgatagttcaggtttgaaacactctttttgtagaaactgcaaggggataattgcacttctttgaggcctaccgtagtaaaggaaataacttcctatagaaagaagacagaagcattctcagaaccctcttcgtgatgtttgcattcaactcacagtgctgaacctttctttgatagttcagctttgaaacactcttcttgtagaaactgcaagtggatatttggtcctctctgaggatttcgttggaaacgggataaaccgcacagaactaaacagaagaattctcagagccctcttcgtgatgtttgcattcaactcacagtgctgaacctttctttgatagtgcagctttgaaacactctttttgtagaaactgcaagtggatgtttggtcctctctgaggatttcgttggaaacgggataaaccgcacagaactaaaacagaagcattgtcagaaacttctttgtgatgattgcattcaactcacagagttgaaggttccttttcaaacagcagtttccaatcactctttctgtggaatctgcaagtggatatttgggcctctctgaggatttcgttggaaacgggataaaacgcacagaactaaaacagaagcattctcagaaacttctctgtgatgtttgtgttcaactcccagagtttcacgttgcttttcatagagtagttctgaaacatgcttttcgtagtgtctgcaagtggacatttggagcgctttcaggcctgtggtggaaaacgaattatggtcacataaaaactggagagaagccttctcagaaacttctctgtgatgattgcattcaactcacagagttgaaccctcctatggatagagcagtgttgaaactctctttttgtggaatctgcaagtggatatgtggacctctccgaagatgtctttggaaacgggaatatcttcacataaaaactaaacagaagcattctcagaaacttcttggtgatgtttgcattcaaatcccagagttgaaccttcctttgatagttcaggtttgaaacactctttctgtaggatctgcaagtggctatttggaccactctgtggccttcgttcgaaacgggtatatcttcgcataaaatctagacagaagcattctcagaaaatactttgtgatgattgagtttaaatcacagagctgaccattcctttggatggagcaggtttgagacacactttttgtagaatctacaagtggatatttggacctctctgaggatttcgttggaaacgggataactgcacctaactaaacggaagcattctcagaaactgctttgtgatgattgcattcacctcacagagttgaacattcctattgatagagcagtttggaaacactcttgttgtggaatgtgcaagtggagatttggagcgctttgaggcctatggtagtaaagggaatagcttcatagaaaaactagacagatgcattctcaggaactttttggtgatgtttgtattcaactcccagagttgaactttcctttggaaagagcagctatgaaacactctttttctagaatctgcaagtggacgtttggagggctttgtggtttgtggtggaaaaggaaatatcttcacctaaatactagatagaagcatcctcagaagcttctctgtgatgactgcattcaactcacggagttgaacactccttttgagagcgcagttttgaaactctctttctgtggcatctgcaaggggacatgtagacctctttgaagatttcgttggaaacggaatcatcttcacataaaaactatacagaagcagtctcagaatcttctttgtgatgtttgcattcaaatccccgagttgaactttcctttcaaagttcacgtttgaaacactctttttgcaggatctacaagtggatatttggaccactctgtgtccttcgttcgaaacgggtatatcttcacatgacatctagacagaagctttctcagaaaattctttgggatgattgagttgaactcacagagctgagcattccttgcgatgtagcagtttagaaacacactttctgcagaatctgcaagtgcatatttggacctctgtgaggaattcgttggaaacgggataatttcagctgactaaacagaagcattctcagaaccttcttcgtgatgtctgcattcaactcacagtgtggaacctttctttgatagttcaggtttgaaacactctttttgtagaaactgcaaggggataattgcactctttgaggagtaccgtagtaaaggaaataacttcctataaaaagaagacagaagcattctcagaaccctcttcgtgatgtttgcattcaactcacagtgctgaacctttctttgatagttcagctttgaaacactctttttgtagaaactgcaagtggatatttggtcctctctgaggatttcgttggaaacgggataaactgcacagaactaaacagaagcattctcagaaccttcttcgtgatgtttgcattcaacccacagtgttgaacctttctttgatagttcaggtttgaaacggtctttctgcagaaactgcaagtagatatttggacctctctgaggatttcgttggaaacgggataccccgcacagaactaaaacagaagcattcacagaaaactcttggtgacgactgagtttaactcacagagctgaacattcctttggatggagcagtttcgaaacacactatttgtagaatgtgcaagtggatatttaggcctctctgaggatttcgttggaaacgggataaaccgcacagaactaaacagaagcattctcagaaactactttgtgatgattgcattcaagtcacagagttgaacattccctttgacagagcagtttggaaactctctttgtgtagaatctgcaagtggagatatggaccgctttgaggcctatggtagtaaaggaaatagcttcatataaaagctagacagtagcattctcagaaacttctttgtgatgcttgcattcaactcacagagttgaactttcctttcgagagagaagctttgaaacactctttttccagaatctgcaagtggacatttggagggctttgaggcctgtggtggaaaaggaattatcttcccgtaaaagctagatagaagcattgtcagaaacttctttgtgatgattgcattcaactcacagagatgaaggttcctttacaaacagcagtttccaaacactctttctgtggaatctgcaagtggatatttggacctctttgaagatttcgttggaaacgggagaatcttcacagaaaagctaaacagaagcattctcagaaacttctctgtgatgtttgtgttcaactcccagagtttcacattgcttttcatagagtagttctgaaacatgcttttcgtagtgtctgcaagtggacatttggagcgctttcaggcctgtggtggaaaacgaattatggtcacataaaaactggagagaagccttctcagaaacttctctgtgatgattgcattcaactcacagagttgaaccctcctatggatagagcagtgttgaaactctctttttgtggaatctgcaagtggatatgtggacctctccgaagatgtctttggaaacgggaatatcttcacataaaaactaaacagaagcattctcagaaacttcttggtgatgtttgcattcaaatcccagagttgaaccttcctttgatagttcaggtttgaaacactctttttgtaggatctgcaagtggatatttggaccactctgtggccttcgttcgaaacgggtatatcttcgcataaaatctagacagaagcattctcagaaaatactttgtgatgattgagtttaacccacagagctgaacattcctttggatggagcaggtttgagacacactttttgtagaatctacaagtggatattgggacctctctgaggatttcgttggaaacgggataactgcacctaactaaacggaagcattctcagaaactgctttgtgatgattgcattcacctcacagagttgaacattcctattgatagagcagtttggaaacactcttgttgtggaatgtgcaagtggaaatttggagcgctttgaggcctatggtagtaaagggaatagcttcatagaaaaactagacagatgcattctcaggaactttttggtgatgtttgtattcaactcccagagttgaactttcctttggaaagagcagctatgaaacactctttttctagaatctgcaagtggacgtttggagggctttgtggtttgtggtggaaaaggaaatatcttcacctaaatactagatagaagcattctcagaagcttctctgtgatgactgcattcaactcacggagttgaacactccttttgagagcgcagttttgaaactctctttctgtggcatctgcaaggggacatgtagacctctttgaagatttcgttggaaacggaatcatcttcacataaaaactatacagaagcagtctcagaatcttctttgtgatgtttgcattcaaatcccagagttgaactttcctttcaaagttcacgtttgaaacactctttttgcaggatctacaagtggatatttggaccactctgtgtccttcgttcgaaacgggtatatcttcacacgacatctagacagaagctttctcagaaaattctttgggatgattgagtggaactcacagagctgaacattccttgtaatgtagcagtttagaaacacactttctgcagaatctgcaagtgcatatttggacctctctgaggaattcgttggaaacgggataatttcagctgactaaacagaagcattctcagaaccttcttcgtgatgtctgcattcaactcacagtgtggaacctttctttgatagttcaggtttgaaacactctttttgtagaaactgcaaggggataattgcacttctttgaggcctaccgtagtaaaggaaataacttcctatagaaagaagacagaagcattctcagaaccctcttcgtgatgtttgcattcaactcacagtgctgaacctttctttgatagttcagctttgaaacactcttcttgtagaaactgcaagtggatatttggtcctctctgaggatttcgttggaaacgggataaaccgcacagaactaaacagaagaattctcagagccctcttcgtgatgtttgcattcaactcacagtgctgaacctttctttgatagtgcagctttgaaacactctttttgtagaaactgcaagtggatgtttggtcctctctgaggatttcgttggaaacgggataaaccgcacagaactaaaacagaagcattgtcagaaacttctttgtgatgattgcattcaactcacagagttgaaggttccttttcaaacagcagtttccaatcactctttctgtggaatctgcaagtggatatttgggcctctctgaggatttcgttggaaacgggataaaacgcacagaactaaaacagaagcattctcagaaacttctctgtgatgtttgtgttcaactcccagagtttcacgttgcttttcatagagtagttctgaaacatgcttttcgtagtgtctgcaagtggacatttggagcgctttcaggcctgtggtggaaaacgaattatggtcacataaaaactggagagaagccttctcagaaacttctctgtgatgattgcattcaactcacagagttgaaccctcctatggatagagcagtgttgaaactctctttttgtggaatctgcaagtggatatgtggacctctccgaagatgtctttggaaacgggaatatcttcacataaaaactaaacagaagcattctcagaaacttcttggtgatgtttgcattcaaatcccagagttgaaccttcctttgatagttcaggtttgaaacactctttctgtaggatctgcaagtggctatttggaccactctgtggccttcgttcgaaacgggtatatcttcgcataaaatctagacagaagcattctcagaaaatactttgtgatgattgagttaaaatcacagagctgaacattcctttggatggagcaggtttgagacacactttttgtagaatctacaagtggatatttggacctctctgaggatttcgttggaaacgggataactgcacctaactaaacggaagcattctcagaaactgctttgtgatgattgcattcacctcacagagttgaacattcctattgatagagcagtttggaaacactcttgttgtggaatgtgcaagtggagatttggagcgctttgaggtctatggtagtaaagggaatagcttcatagaaaaactagacagatgcattctcaggaactttttggtgatgtttgtattcaactcccagagttgaactttcctttggaaagagcagctatgaaacactctttttctagaatctgcaagtggacgtttggagggctttgtggtttgtggtggaaaaggaaatatcttcacctaaatactagatagaagcattctcagaagcttctctgtgatgactgcattcaactcacggagttgaacactccttttgagagcgcagttttgaaactctctttctgtggcatctgcaaggggacatgtagacctctttgaagatttcattggaaacggaatcatcttcacataaaaactatacagaagcagtctcagaatcttctttgtgatgtttgcattcaaatcccagagttgaactttcctttcaaagttcacgtttgaaacactctttttgcaggatctacaagtggatatttggaccactctgtgtccttcgttcgaaacgggtatatcttcacatgacatctagacagaagctttctcagaaaattctttgggatgattgagttgaactcacagagctgaacattccttgcgatgtagcagtttagaaacacactttctgcagaatctgcaagtgcatatttggacctccctgaggaattcgttggaaacgggataatttcagctgactaaacagaagcattctcagaaccttcttcgtgatgtctgcattcaactcacagtgtggaacctttctttgatagttcaggtttgaaacactctttttgtagaaactgcaagggtataactgcacttctttgaggcctaccgtagtaaaggaaataacttcctataaaaagaagacagaagcattctcagaaccctcttcgtgatgtttgcattaaactcacagtgctgaacgtttctttgatacttcagctttgaaacactctttttgtagaaactgcaagtggatatttggtcctctctgaggatttctttggaaacgggataaaccgcacagaactaaacagaagcattcacagaaaactcttggtgacgactgagtttaactcacagagctgaacatccctttggatggagcagtttcgaaacacactatttgtagaatgtgcaagtggatattggggcctctctgaggatttcgttggaaacgggataaaccgcacagaactaaaacagaagcattctcagaaactactttgtgatgattgcattcaagtcacagagttgaacattccctttgacagagcagtttggaaactctctttgtgtagaatctgcaagtggagatatggaccgctttgaggcctatggtagtaaaggaaatagcttcatataaaagctagacagtagcattctcagaaacttctttgtgatgcttgcattcaactcacagagttgaactttcctttcgagagagaagctttgaaacactctttttccagaatctgcaagtggacatttggagggctttgaggcctgtggtggaaaaggaattatcttcccgtaaaagcctagatagaagcattgtcagaaacttctttgtgatgattgcattcaagtcacagagttgaaggttccttttcaaagagcagtttccaatcactctttctgtggaatctgcaagtggatatttggacctctttgaagatttcgttggaaacgggagaatcttcacagaaaagctaaacagaagcattctcagaaacttctctgtgatgtttgtgttcaactcccagagtttcacattgcttttcatagagtagttctgaaacatgcttttcgtagtgtctgcaagtggacatttggagcgctttcaggcctgtggtggaaaacgaattatggtcacataaaaactggagagaagccttctcagaaacttctctgtgatgattgcattcaactcacagagttgaaccctcctatggatagagcagtgttgaaactctctttttgtggaatctgcaagtggatatgtggacctctccgaagatgtctttggaaacgggaatatcttcacataaaagctaaacagaagcattctcagaaacttcttggtgatgtttgcattcaaatcccagagttgaaacttcctttgataggtcagatttgaaacactctttctgtacgatctgcaagtggatatttggaccactctgtggccttcgttcgaaacgggtacatcttcgcataaaatctagacagaagcattctcagaaaattctttgtgatgattgagtttaactcacagagctgaacattcctttggatggaccacgtttgagacacactttttgtagaatctacaagtggatatttagacctctctgaggatttcgttggaaacggtataactgcacctaactaaacggaagcattctcagaaactgctttgtgatgattgcattcacctcacagagttgaacattcctattgatagagcagtttggaaacactcttcatgtggaatgtgcaagtggagatttggagcgctttgaggcctatggtagtaaagggaatagcttcatagaaaaactagacagatgcattctcaggaactttttggtgatgtttgtattcaactcccagagttgaactttcctttggaaagagcagctatgaaacactctttttctagaatctgcaagtggacgtttggagggctttgtggtttgtggtggaaaaggaaatatcttcacctaaatactagatagaagcattctcagaagcttctctgtgatgactgcattcaactcacggagttgaacactccttttgagagcgcagttttgaaactctctttctgtggcatctgcaaggggacatgtagacctctttgaagatttcgttggaaacggaatcatcttcacataaaaactatacagaagcagtctcagaatcttctttgtgatgtttgcattcaaatcccagagttgaactttcctttcaaagttcacgtttgaaacactctttttgcaggatctacaagtggatatttggaccactctgtgtccttcgttcgaaacgggtatatcttcacaagacatctagacagaagctttctcagaaaattctttgggatgattgagtggaactcacagatctgaacattccttgcgatgtagcagtttagaaacacactttctgcagaatctgcaagtgcatatttggacctctctcaggaattcgttggaaacgggataatttcagctgactaaacagaagcattctcagaaccttcttcgtgatgtctgcattcaactcacagtgtggaacctttctttgatagttcaggtttgaaacactctttttgtagaaactgcaaggggataattgcacttctttgaggcctaccgtagtaaaggaaataacttcctatagaaagaagacagaagcattctcagaaccctcttcgtgatgtttgcattcaactcacagtgctgaacctttctttgatagttcagctttgaaacactcttcttgtagaaactgcaagtggatatttggtcctctctgaggatttcgttggaaacgggataaaccgcacagaactaaacagaagaattctcagagccctcttcgtgatgtttgcattcaactcacagtgctgaacctttctttgatagtgcagctttgaaacactcttcttgtagaaactgcaagtggatgtttggtcctctctgaggatttcgttggaaacgggataaaccgcacagaactaaaacagaagcattgtcagaaacttctttgtgatgattgcattcaactcacagagttgaaggttccttttcaaacagcagtttccaatcactctttctgtggaatctgcaagtggatatttgggcctctctgaggatttcgttggaaacgggataaaacgcacagaactaaaacagaagcattctcagaaacttctctgtgatgtttgtgttcaactcccagagtttcacgttgcttttcatagagtagttctgaaacatgcttttcgtagtgtctgcaagtggacatttggagcgctttcaggcctgtggtggaaaacgaattatggtcacataaaaactggagagaagccttctcagaaacttctctgtgatgattgcattcaactcacagagttgaaccctcctatggatagagcagtgttgaaactctctttttgtggaatctgcaagtggatatgtggacctctccgaagatgtctttggaaacgggaatatcttcacataaaaactaaacagaagcattctcagaaacttcttggtgatgtttgcattcaaatcccagagttgaaccttcctttgatagttcaggtttgaaacactctttctgtaggatctgcaagtggctatttggaccactctgtggccttcgttcgaaacgggtatatcttcgcataaaatctagacagaagcattctcagaaaatactttgtgatgattgagtttaaatcacagagctgaccattcctttggatggagcaggtttgagacacactttttgtagaatctacaagtggatatttggacctctctgaggatttcgttggaaacgggataactgcacctaactaaacggaagcattctcagaaactgctttgtgatgattgcattcacctcacagagttgaacattcctattgatagagcagtttggaaacactcttgttgtggaatgtgcaagtggagatttggagcgctttgaggcctatggtagtaaagggaatagcttcatagaaaaactagacagatgcattctcaggaactttttggtgatgtttgtattcaactcccagagttgaactttcctttggaaagagcagctatgaaacactctttttctagaatctgcaagtggacgtttggagggctttgtggtttgtggtggaaaaggaaatatcttcacctaaatactagatagaagcattctcagaagcttctctgtgatgactgcattcaactcacggagttgaacactccttttgagagcgcagttttgaaactctctttctgtggcatctgcaaggggacatgtagacctctttgaagatttcgttggaaacggaatcatcttcacataaaaactatacagaagcagtctcagaatcttctttgtgatgtttgcattcaaatcccagagttgaactttcctttcaaagttcacgtttgaaacactctttttgcaggatctacaagtggatatttggaccactctgtgtccttcgttcgaaacgggtatatcttcacacgacatctagacagaaagctttctcagaaaattctttgggatgattgagtggaactcacagagctgaacattccttgcgatgtagcagtttagaaacacactttctgcagaatctgcaagtgcatatttggacctctctgaggaattcgttggaaacgggataatttcagctgactaaacagaagcattctcagaaccttcttcgtgatgtctgcattcaactcacagtgtggaacctttctttgatagttcaggtttgaaacactctttttgtagaaactgcaaggggataattgcacttctttgaggcctacgtagtaaaggaaataacttcctatagaaagaagacagaagcattctcagaaacttctttgtgatgcttgcattcaactcacagagttgaactttcctttcgagagagaagctttgaaacactctttttccagaatgagcaagtggacatttggagggctttgaggcctgtgttggaaaaggaattatcttcccgtaaaagctagatagaagcattgtcagaaacttctttgtgatgattgcattcaactcacagagttgaaggttccttttcaaagagcagtttccaatcactttttttgtggaatctgcaagtggatatttggacctattttgaagatttcgttggaaacgggagtatcttcacagaaaagctaaacagaagcattctcagaaacttctctgtgatgtttttgttcaactcccagagtttcacattgcatttcatagagtagttctgaaacatgcttttcgtagtgtctacaagtggacatttggagcgctttcaggcctgtggtggaaaacgaataatggtcacataaaaactggagagaagccttctcagaaacttctctgtgatgattgcattcaactcacagagttgaaccctcctatggatagagcagtgttgaaactctctttttgtggaatctgcaagtggatatgtggacctctccgaagatgtctttggaaacgggaatatcttcacataaaaactaaacagaagcattctcagaaacttcttggtgatgtttgcattcaaatcccagagttgaaccttcctttgatagttcaggtttgaaacactctttctgtaggatctgcaagtggctatttggaccactctgtggccttcgttcgaaacgggtatatcttcgcataaaatctagacagaagcattctcagaaaatactttgtgatgattgagtttaaatcacagagctgaccattcctttggatggagcaggtttgagacacactttttgtagaatctacaagtggatatttggacctctctgaggatttcgttggaaacgggataactgcacctaactaaacggaagcattctcagaaactgctttgtgatgattgcattcacctcacagagttgaacattcctattgatagagcagtttggaaacactcttgttgtggaatgtgcaagtggagatttggagcgctttgaggcctgtggtagtaaagggaatagcttcatagaaaaactagacagatgcattctcaggaactttttggtgatgtttgtattcaactcccagagttgaactttcctttggaaagagcagctatgaaacactctttttctagaatctgcaagtggacgtttggagggctttgtggtttgtggtggaaaaggaaatatcttcacctaaatactagatagaagcattctcagaagcttctctgtgatgactgcattcaactcacggagttgaacactccttttgagagcgcagttttgaaactctctttctgtggcatctgcaaggggacatgtagacctctttgaagatttcgttggaaacggaatcatcttcacataaaaactatacagaagcagtctcagaatcttctttgtgatgtttgcattcaaatcccagagttgaactttcctttcaaagttcacgtttgaaacactctttttgcaggatctacaagtggatatttggaccactctgtgtccttcgttcgaaacgggtatatcttcacacgacatctagacagaagctttctcaggaaaattctttgggatgattgagtggaactcacagtgctgaacattccttgcgatgtagcagtttagaaacacactttctgcagaatctgcaagtgcatatttggacctctctgaggaattcgttggaaacgggataatttcagctgactaaacagaagcattctcagaaccttcttcgagatgtctgcattcaactcacagtgtggaacctttctttgatagttcaggtttgaaacactctttttgtggaaactgcaaggggataattgcacttctttgaggcctaccgtagtaatggaaataacttcctataaaaagaagacagaagaattctcagagccctcttcgtgatgtttgcattcaactcacagtgctgaacttttctttgatagtgcagctttgaaacactctttttgtagaaactgcaagtggatgtttggtcctctctgaggatttcgttggaaacgggataaaccgcacagaactaaaacagaagcattgtcagaaacttctttgtgatgattgcattcaactcacagagttgaaggttccttttcaaacagcagtttccaatcactctttctgtggaatctgcaagtggatatttgggcctctctgaggatttcgttggaaacgggataaaacgcacagaactaaaacagaagcattctcagaaacttctctgtgatgtttgtgttcaactcccagagtttcacgttgcttttcatagagtagttctgaaacatgcttttcgtagtgtctgcaagtggacatttggagcgctttcaggcctgtggtggaaaacgaattatggtcacataaaaactggagagaagccttctcagaaacttctctgtgatgattgcattcaactcacagagttgaaccctcctatggatagagcagtgttgaaactctctttttgtggaatctgcaagtggatatgtggacctctccgaagatgtctttggaaacgggaatatcttcacataaaaactaaacagaagcattctcagaaacttcttggtgatgtttgcattcaaatcccagagttgaaccttcctttgatagttcaggtttgaaacactctttttgtaggatctgcaagtggctatttggaccactctgtggccttcgttcgaaacgggtatatcttcgcataaaatctagacagaagcattctcagaaaatactttgtgatgattgagtttaaatcacagagctgaacattcctttggatggagcaggtttgagacacacattttgtagaatctacaagtggatatttggacctctctgaggatttcgttggaaacgggataactgcacctaactaaacggaagcattctcagaaactgctttgtgatgattgcattcacctcacagagttgaacattcctattgatagagcagtttggaaacactcttgttgtggaatgtgcaagtggagatttggagcgctttgaggcctatggtagtaaagggaatagcttcatagaaaaactagacagatgcattctcaggaactttttggtgatgtttgtattcaactcccagagttgaactttcctttggaaagagcagctatgaaacactctttttctagaatctgcaagtggacgtttggagggctttgtggtttgtggtggaaaaggaaatatcttcacctaaatactagatagaagcattctcagaagcttctctgagatgactgcattcaactcacggagttgaacactccttttgagagcgcagttttgaaactctctttctgtggcatctgcaaggggacatgtagacctctttgaagatttcgttggaaacggaatcatcttcacataaaaactatacagaagcagtctcagaatcttctttgtgatgtttgcattcaaatccccgagttgaactttcctttcaaagttcacgtttgaaacactctttttgcaggatctacaagtggatatttggaccactctgtgtccttcgttcgaaacgggtatatcttcacatgacatctagacagaagctttctcagaaaattctttgggatgattgagttgaactcacagagctgagcattccttgcgatgtagcagtttagaaacacactttctgcagaatctgcaagtgcatatttggacctctgtgaggaattcgttggaaacgggataatttcagctgactaaacagaagcattctcagaacttcttcgtgatgtctgcattcaactcacagtgtggaacctttctttgatagttcaggtttgaaacactctttctgtagaaactgcaaggggataattgcactctttgaggagtaccgtagtaaaggaaataacttcctataaaaagaagacagaagcattctcagaaccctcttcgtgatgtttgcattcaactcacagtgctgaacctttctttgatagttcagctttgaaacactcttcttgtagaaactgcaagtggatatttggtcctctctgaggatttcgttggaaacgggataaaccgcacagaactaaacagaagaattctcagagccctcttcgtgatgtttgcattcaactcacagtgctgaacctttctttgatagtgcagctttgaaacactctttttgtagaaactgcaagtggatatttggtcctctctgaggatttcgttggaaacgggataaaccgcaaagaactaaaacagaagcattgtcagaaacttctttgtgatgattgcattcaactcacagagttgaaggttccttttcaaacagcagtttccaatcactctttctgtggaatctgcaagtggatatttgggcctctctgaggatttcgttggaaacgggataaaacgcacagaactaaaacagaagcattctcagaaacttctctgtgatgtttgtgttcaactcccagagtttcacgttgcttttcatagagtagttctgaaacatgcttttcgtagtgtctgcaagtggacatttggagcgctttcaggcctgtggtggaaaacgaattatggtcacataaaaactggagagaagccttctcagaaacttctctgtgatgattgcattcaactcacagagttgaaccctcctatgggtagagcagtgttgaaactctctttttgtggaatctgcaagtggatatgtggacctctccgaagatgtctttggaaacgggaatatcttcacataaaaactaaacagaagcattctcagaaacttcttggtgatgtttgcattcaaatcccagagttgaaccttcctttgatagttcaggtttgaaacactctttctgtaggatctgcaagtggctatttggaccactctgtggccttcgttcgaaacgggtatatcttcgcataaaatctagacagaagcattctcagaaaatactttgtgatgattgagtttaaatcacagagctgaccattcctttggatggagcaggtttgagacacactttttgtagaatctacaagtggatatttggacctctctgaggatttcgttggaaacgggataactgcacctaactaaacggaagcattctcagaaactgctttgtgatgattgcattcacctcacagagttgaacattcctattgatagagcagtttggaaacactcttgttgtggaatgtgcaagtggagatttggagcgctttgaggcctgtggtagtaaagggaatagcttcatagaaaaactagacagatgcattctcaggaactttttggtgatgtttgtattcaactcccagagttgaactttcctttggaaagagcagctatgaaacactctttttctagaatctgcaagtggacgtttggagggctttgtggtttgtggtggaaaaggaaatatcttcacctaaatactagatagaagcattctcagaagcttctctgtgatgactgcattcaactcacggagttgaacactccttttgagagcgcagttttgaaactctctttctgtggcatctgcaaggggacatgtagacctctttgaagatttcgttggaaacggaatcatcttcacataaaaactatacagaagcagtctcagaatcttctttgtgatgtttgcattcaaatcccagagttgaactttcctttcaaagttcacgtttgaaacactctttttgcaggatctacaagtggatatttggaccactctgtgtccttcgttcgaaacgggtatatcttcacacgacatctagacagaagctttctcagaaaattctttgggatgattgagtggaactcacagagctgaacattccttgcgatgtagcagtttagaaacacactttctgcagaatctgcaagtgcatatttggacctctctgaggaattcgttggaaacgggataatttcagctgactaaacagaagcattctcagaaccttcttcgtgatgtctgcattcaactcacagtgtggaacctttctttgatagttcaggtttgaaacactctttttgtagaaactgcaaggggataattgcacttctttgaggcctaccgtagtaaaggaaataacttcctatagaaagaagacagaagcattctcagaaccctcttcgtgatgtttgcattcaactcacagtgctgaacctttctttgatagttcagctttgaaacactcttcttgtagaaactgcaagtggatatttggtcctctctgaggatttcgttggaaacgggataaaccgcacagaactaaacagaagaattctcagagccctcttcgtgatgtttgcattcaactcacagtgctgaacctttctttgatagtgcagctttgaaacactctttttgtagaaactgcaagtggatgtttggtcctctctgaggatttcattggaaacgggataaaccgcacagaactaaaacagaagcattgtcagaaacttctttgtgatgattgcattcaactcacagagttgaaggttccttttcaaacagcagtttccaatcactctttctgtggaatctgcaagtggatatttgggcctctctgaggatttcgttggaaacgggataaaacgcacagaactaaaacagaagcattctcagaaacttctctgtgatgtttgtgttcaactcccagagtttcacgttgcttttcatagagtagttctgaaacatgcttttcgtagtgtctgcaagtggacatttggagcgctttcaggcctgtggtggaaaacgaattatggtcacataaaaactggagagaagccttctcagaaacttctctgtgatgattgcattcaactcacagagttgaaccctcctatggatagagcagtgttgaaactctctttttgtggaatctgcaagtggatatgtggacctctccgaagatgtctttggaaacgggaatatcttcacataaaaactaaacagaagcattctcagaaacttcttggtgatgtttgcattcaaatcccagagttgaaccttcctttgatagttcaggtttgaaacactctttttgtaggatctgcaagtggctatttggaccactcagtggccttcgttcgagacgggtatatcttcgcataaaatctagacagaagcattctcagaaaatactttgtgatgattgagttgaactcacagagctgaacattcctttggatggagcaggtttgagacacactttttgtagaatctacaagtggatatttggacctctctgaggatttcgttggaaacgggataactgcacctaactaaacggaagcattctcagaaactgctttgtgatgattgcattcacctcacagagttgaccattcctattgatagagcactttggaaacactcttgttgtggaatgtgcaagtggagatttggagcgctttgaggcctatggtagtaaagggaatagcttcatagaaaaactagacagatgcattctcaggaactttttggtgatgtttgtattcaactcccagagttgaactttcctttggaaagagcagctatgaaacactctttttctagaatctgcaagtggacgtttggagggctttgtggtttgtggtggaaaaggaaatatcttcacctaaatactacatagaagcattctcagaagcttctctgtgatgactgcattcaactcacggagttgaacactccttttgagagcgcagttttgaaactctctttctgtgtcatctgcaaggggacatgtagacctctttgaagatttcgttggaaacggaatcatcttcacatcaaaactatacagaagcagtctcagaatcttctttgtgatgtttgcattcaaatcccagagttgaactttcctttcaaagttcacgtttgaaacactctttttgcaggatctacaagtggatatttggaccactctgtgtccttcgttcgaaacgggtatatcttcacatgacatctagacagaagctttctcagaaaattctttgggatgattgagttgaactcacagagctgaacattccttgcgatggagcagtttagaaacacactttctgcagaatctgcaagtgcatatttggacctctctgaggaattcgttggaaacgggataatttcagctgactaaacagaagcattctcagaaccttcttcgtgatgtctgcattcaactcacagtgtggaacctttatttgatagttcaggtttgaaacactctttttgtagaaactgcaaggggataattgcacttctttgaggcctaccgtagtaaaggaaataacttcctataaaaagaagacagaagcattctcagaaccctcttcgtgatgtttgcattcaactcacagtgctgaacctttctttgatagttcagctttgaaacactctttttgtagaaactgcaagtggatatttggtcctctctgaggatttcgttggaaacgggataaaccgcacagaactaaacagaagcattcacagaaaacgcttggtgacgactgagtttaactcacagagctgaacattcctttggatggagcagtttcgaaacacactatttgtagaatctgcaagtggatatttgggcctctctgaggatttcgttggaaaagggataaaccgcacagaactaaaacagaagcattctgggaaacaactttgtgatgattgcattcaagtcacagagctgaacattccctttgacagagcagtttggaaactctctttgtgtagaatctgcaagtggagatatggaatgctttgaggactatggtagtaaaggaaatagcttcatataaaagctagacagtagcattctcagaaacttctttgtgatgcttgcattcaactcacagagttgaactttcctttcgagagagaagctttgaaacactctttttccagaatctgcaagtggacatttggagggctttgaggcctgtggtggaaaaggaattatcttcccgtaaaagctggatagaagcattgtcagaaacttctttgtgatgattgcattcaactcacagagttgaaggttccttttcaaacagcagtttccaaacactctttctgtggaatctgcaagtggatatttggacctctttgaagatttcgttggaaatgggataaccttcacagaaaagctaatcagaagcattctcagaaacttctctgtgatgtttgtgttcaactcccagagtgtcacattgcttctcatagagtagttctgaaacatgcttttcgtagtgtctgcaaggggacatttggagcgctttcaggcctgtggtggaaaacgaattatggtcacataaaaactggagagaagccttctcagaaacttctctgtgatgattgcattcaactcacagagttgaaccctcctatggatagagcagtgttgaaactctctttttgtggaatctgcaagtggatatgtggacctctccgaagatgtctttggaaacgggactatcttcacataaaaactaaacagaagcattctcagaaacttcttggtgatgtttgcattcaaatcccagagttgaaccttcctttgatagttcaggtttgaaacactctttttgtaggatctgcaagtggatatttggaccactctgtggccttcgttcgaaacgggtacatcttcgcataaaatctagacagaagcattctcagaaaatactttgtgatgattgagtttaactcacagagctgaacattcctttggatggagcaggcttgagacacactttttgtagaatccacaagtggatatttggacctctctgaggatttcgttggaaacgggataactgcaccgaactaaacggaagcattctcagaaactgctttgtgatgattgcattcacctcacagagttgaccattcctattgatagagcagtttggaaacactcttgttgtggaatgtgcaagtggagatttggagcgctttgaggcctatggtagtaaagggaatagcttcatagaaaaactagacagatgcattctcaggaactttttggtgatgtttgtattcaactcccagagttgaactttcctttggaaagagcagctatgaaacactctttttctagaatctgcaagtggacgtttggagggctttgtggtttgtggtggaaaaggaaatatcttcacctaaatactagatagaagcattctcagaagcttctctgtgatgactgcattcaactcacggagttgaacactccttttgagagcgcagttttgaaactctctttctgtggcatctgcaaggggacatgtagacctctttgaagatttcgttggaaacggaatcatcttcacataaaaactatacagaagcagtctcagaatcttctttgtgatgtttgcattcaaatcccagagttgaactttcctttcaaagttcacgtttgaaacactctttttgcaggatctacaagtggatatttggaccactctgtgtccttcgttcgaaacgggtatatcttcacacgacatctagacagaagctttctcagaaaattctttgggatgattgagtggaactcacagagctgaacattccttgcgatgtagcagtttagaaacacactttctgcagaatctgcaagtgcatatttggacctctctgaggaattcgttggaaacgggataatttcagctgactaaacagaagcattctcagaaccttcttcgtgatgtctgcattcaactcacagtgtggaacctttctttgatagttcaggtttgaaacactctttttgtagaaactgcaaggggataattgcacttctttgaggcctaccgtagtaaaggaaataacttcctatagaaagaagacagaagcattctcagaaccctcttcgtgatgtttgcattcaactcacagtgctgaacctttctttgatagttcagctttgaaacactcttcttgtagaaactgcaagtggatatttggtcctctctgaggatttcgttggaaacgggataaaccgcacagaactaaacagaagcattctcagaaccttcttcgtgatgtttgcattcaactcacagtgttgaacctttctttgatagttcaggtttgaaacggtctttctgtagaaactgcaagtagatatttggacctctctgaggatttcgttggaaacgggataaaccgcacagaactaaaacagaagcattcacagaaaactcttggtgacgactgagtttaactcacagagctgaacattcctttggatggagcagtttcgaaacacactatttgtagaatgtgcaagtggatatttgagcctctctgaggatttcgttggaaacgggataaaccgcacagaactaaacagaagcattctcagaaactactttgtgacgattgcattcaagtcacagagttgaacattccctttgacagagcagtttggaaactctctttgtgtagaatctgcaagtggagatatggaccgctttgaggcctatggtagtaaaggtaatagcttcatatgaaagctagacagtagcattctcagaaacttctttgtgatgcttgcattcaactcacagagttgaactttcctttcgagagagaagctttgaaacactctttttccagaatctgcaagtggacatttggagggctttgaggcctgtggtggaaaaggaattaacttcccgtaaaagctagatagaagcattgtcagaaacttctttgtgatgattgcattcaactcacggagatgaaggttcctttacaaacagcagtttccaaacactctttctgtggaatctgcaagtggatatttggacctctttgaagatttcgttggaaacgggagaatcttcacagaaaagctaaacagaagcattctcagaaacttctctgtgatgtttgtgttcaactcccagagtttcacattgcttttcatagagtagttctgaaacatgcttttcgtagtgtctgcaagtagacatttggagcgctttcaggcctgtggtggaaaacgaattatggtcccataaaaactggagagaagccttctcagaaacttctctgtgatgattgcattcaactcacagagttgaaccctcctatggatagagcattgttgaaactctctttttgtggaatctgcaagtggatatgtggacctctccgaagatgtctttggaaacgggaatatcttcacataaaaactaaacagaagcattctcagaaacttcttggtgatgtttgcattcaaatcccagagttgaaccttcctgtgatagttcaggtttgaaacactctttttgtaggatctgcaagtggatatttggaccactctgtggccttcattcgaaacgggtacatcttcacataaaatctagacacaagcattctcagaaaatactttgtgatgattgagtttaactcacagagctgaacattcctttggatggagcaggtttgagacacactttttgtagaatctacaagtggatatttggacctctctgaggatttcgttggaaacgcgataactgcacctaaataaacggaagcattctcagaaactgctttgtgatgattgcattcacctcacagagttgaacattcctattgatagagcagtttggaaacactcttgttgtggaatgtgcaagtggagatttggagcgctttgaggcctatggtagtaaagggaatagcttcatagaaaaactagacagatgcattctcaggaactttttggtgatgtttgtattcaactcccagagttgaactttcctttggaaagagcagctatgaaacactctttttctagaatctgcaagtggacgtttggagggctttgtggtttgtggtggaaaaggaaatatcttcacctaaatactagatagaagcattctcagaagcttctctgtgatgactgcattcaactcacggagttgaacactccttttgagagcgcagttttgaaactctctttctgtggcatctgcaaggggacatgtagacctctttgaagatttcgttggaaacggaatcatcttcacataaaaactatacagaaagcagtctcagaatcttctttgtgatgtttgcattcaaatcccagagttgaactttcctttcaaagttcacgtttgaaacactctttttgcaggatctacaagtggatatttggaccactctgtgtccttcgttcgaaacgggtatatcttcacacgacatctagacagagctttctcagaaaattttttgggatgattgagttgaactcacagagctgagcattccttgcgatgtagcagtttagaaacacactttctgcagaatctgcaagtgcatatttggacctctgtgaggaattcgttggaaacgggataatttcagctgactaaacagaagcattctcagaaccttcttcgtgatgtctgcattcaactcacagtgtggaacctttctttgatagttcaggtttgaaacactctttttgtagaaactgcaaggggataattgcacttctttgaggcctaccgtagtaaaggaaataacttcctatagaaagaagacagaagcattctcagaaccctcttcgtgatgtttgcattcaacacacagtgctgaacctttctttgatagttcagctttgaaacactcttcttgtagaaactgcaagtggatatttggtcctctctgaggatttcgttggaaacgggataaaccgcacagaactaaacagaagcattctcagaaccttcttcgtgatgtttgcattcaactcacagtgttgaacctttctttgatagttcaggtttgaaacggtctttctgtagaaactgcaagtagatatttggacctctctgaggatttcgttggaaacgggataacccgcacagaactaaaacagaagcattcacagaaaactcttggtgacgactgagtttaactcacagagctgaacattcctttggatggagcagtttcgaaacacactatttgtagaatgtgcaagtggatatttgggcctctctgaggatttcgttggaaacgggataaaccgcacagaactaaacagaagcattctcagaaactactttgtgatgattgcattcaagtcacagagttgaacattccctttgacagagcagtttggaaactctctttgtgtagaatctgcaagtggagatatggaccgctttgaggcctatggtagtaaaggaaatagcttcatataaaagctagacagtagcattctcagaaacttctttgtgatgcttgcattcaactcacagagttgaactttcctttcgagagagaagctttgaaacactctttttccagaatctgcaagtggacatttggagggctttgaggcctgtggtggaaaaggaattatcttcccgtaaaagctagatagaagcattgtcagaaacttctttgtgatgattgcattcaactcacagagttgaaggttccttttcaaacagcagtttccaatcactctttctgtggaatctgcaagtggatatttggacctattttgaagatttcgttggaaacgggataatcttcacagaaaagctaaacagaagcattctcagaaacttctctgtgatgtttgtgttcaactcccagagtttcacattgcttttcatagagtagttctgaaacatgcttttcgtagtgtctgcaagtggacatttggagcgctttcaggcctgtggtggaaaacgaattatggtcacataaaaactggagagaagccttctcagaaacttctctgtgatgattgcattcaactcacagagttgaaccctcctatggatagagcagtgttgaaactctctttttgtggaatctgcaagtggatatgtggacctctccgaagatgtctttggaaacgggaatatcttcacataaaaactaaacagaagcattctcagaaacttcttggtgatgtttgcattcaaatcccagagttgaaccttcctttgatagttcaggtttgaaacactctttttgtaggatctgcaagtggctatttggaccactctgtggccttcgttcgaaacgggtatatcttcgcataaaatctagacagaagcattctcagaaaatactttgtgatgattgagttgaactcacagagctgaacattcctttggatggagcaggtttgagacacactttttgtagaatctacaagtggatatttggacctctctgaggatttcgttggaaacgggataactgcacctaactaaacggaagcattctcagaaactgctttgtgatgattgcattcacctcacagagttgaacattcctattgatagagcagtttggaaacactcttgttgtggaatgtgcaagtggagatttggagcgctttgaggcctatggtagtaaagggaatagcttcatagaaaaactagacagatgcattctcaggaactttttggtgatgtttgtattcaactcccagagttgaactttcctttggaaagagcagctatgaaacactctttttctagaatctgcaagtggacgtttggagggctttgtggtttgtggtggaaaaggaaatatcttcacctaaatactagatagaagcattctcagaagcttctctgtgatgactgcattcaactcacggagttgaacactccttttgagagcgcagttttgaaactctctttctgtggcatccgcatggggacatgtagacctctttgaagatttcgttggaaacggaatcatcttcacataaaaactatacagaagcagtctcagaatcttctttgtgatgtttgcattcaaatcccagagttgaactttcctttcaaagttcacgtttgaaacactctttttgcaggatctacaagtggatatttggaccactctgtgtccttcgttcgaaacgggtatatcttcacacgacatctagacagaagctttctcagaaaattctttgggatgattgagtggaactcacagagctgaacattccttgcgatgtagcagtttagaaacacactttctgcagaatctgcaagtgcatatttggacctctctgaggaattcgttggaaacgggataatttcagctgactaaacagaagcattctcagaaccttcttcgtgatgtctgcattcaactcacagtgtggaacctttctttgatagttcaggtttgaaacactctttttgtagaaactgcaaggggataattgcacttctttgaggcctaccgtagtaaaggaaataacttcctatagaaagaagacagaagcattctcagaaccctcttcgtgatgtttgcattcaactcacagtgctgaacctttctttgatagttcagctttgaaacactcttcttgtagaaactgcaagtggatatttggtcctctctgaggatttcgttggaaacgggataaaccgcacagaactaaacagaagaattctcagagccctcttcgtgatgtttgcattcaactcacagtgctgaacctttctttgatagtgcagctttgaaacactctttttgtagaaactgcaagtggatgtttggtcctctctgaggatttcgttggaaacgggataaaccgcacagaactaaaacagaagcattgtcagaaacttctttgtgatgattgcattcaactcacagagttgaaggttccttttcaaacagcagtttccaatcactctttctgtggaatctgcaagtggatatttgggcctctctgaggatttcgttggaaacgggataaaacgcacagaactaaaacagaagcattctcagaaacttctctgtgatgtttgtgttcaactcccagagtttcacgttgcttttcatagagtagttctgaaacatgcttttcgtagtgtctgcaagtggacatttggagcgctttcaggcctgtggtggaaaacgaattatggtcacataaaaactggagagaagccttctcagaaacttctctgtgatgattgcattcaactcacagagttgaaccctcctatggatagagcagtgttgaaactctctttttgtggaatctgcaagtggatatgtggacctctccgaagatgtctttggaaacgggaatatcttcacataaaaactaaacagaagcattctcagaaacttcttggtgatgtttgcattcaaatcccagagttgaaccttcctttgatagttcaggtttgaaacactctttttgtaggatctgcaagtggctatttggaccactctgtggccttcgttcgaaacgggtatatcttcgcataaaatctagacagaagcattctcagaaaatactttgtgatgattgagtttaaatcacagagctgaacattcctttggatggagcaggtttgagacacactttttgtagaatctacaagtggatatttggacctctctgaggatttcgttggaaacgggataactgcacctaactaaacggaagcattctcagaaactgctttgtgatgattgcattcacctcacagagttgaacattcctattgatagagcagtttggaaacactcttgttgtggaatgtgcaagtggagatttggagcgctttgaggcctatggtagtaaagggaatagcttcatagaaaaactagacagatgcattctcaggaactttttggtgatgtttgtattcaactcccagagttgaactttcctttggaaagagcagctatgaaacactctttttctagaatctgcaagtggacagtttggagggctttgtggtttgtggtggaaaaggaaatatcttcacctaaatactagatagaagcatcctcagaagcttctctgtgatgactgcattcaactcacggagttgaacactccttttgagagcgcagttttgaaactctctttctgtggcatctgcaaggggacatgtagacctctttgaagatttcgttggaaacggaatcatcttcacataaaaactatacagaagcagtctcagaatcttctttgtgatgtttgcattcaaatccccgagttgaactttcctttcaaagttcacgtttgaaacactctttttgcaggatctacaagtggatatttggaccactctgtgtccttcgttcgaaacgggtatatcttcacatgacatctagacagaagctttctcagaaaattctttgggatgattgagttgaactcacagagctgagcattccttgcgatgtagcagtttagaaacacactttctgcagaatctgcaagtgcatatttggacctctgtgaggaattcgttggaaacgggataatttcagctgactaaacagaagcattctcagaaccttcttcgtgatgtctgcattcaactcacagtgtggaacctttctttgatagttcaggtttgaaacactctttttgtagaaactgcaaggggatcattgcactctttgaggagtaccgtagtaaaggaaataacttcctataaaaagaagacagaagcattctcagaaccctcttcgtgatgtttgcattcaactcacagtgctgaacctttctttgatagttcagctttgaaacactctttttgtagaaactgcaagtggatatttggtcctctctgagcatttcgttggaaacgggataaactgcacagaactaaacagaagcattctcagaacttcttcgtgatgtttgcattcaactcacagtgttgaacctttctttgatagttcaggtttgaaacggtctttctgtagaaactgcaagtagatatttggacctctctgaggatttcgttggaaacgggataacccgcacagaactaaaacagaagcattcacagaaaactcttggtgacgactgagtttaactcacagagctgaacattcctttggatggagcagtttcgaaacacactatttgtagaatgtgcaagtggatatttaggcctctactgaggatttcgttggaaacgggataaaccgcacagaactaaacagaagcattctcagaaactactttgtgatgattgcattcaagtcacagagttgaacattccctttgacagagcagtttggaaactctctttgtgtagaatctgcaagtggagatatggaccgctttgaggcctatggtagtaaaggaaatagcttcatataaaagctagacagtagcattctcagaaacttctttgtgatgcttgcattcaactcacagagttgaactttcctttcgagagagaagctttgaaacactctttttccagaatctgcaagtggacatttggagggctttgaggcctgtggtggaaaaggaattatcttcccgtaaaagctagatagaagcattgtcagaaacttctttgtgatgattgcattcaactcacagagttgaaggttgcttttcaaagagcagtttccaatcactctttctgtggaatctgcaagtggatatttgggcctctttgaagatatcgttggaaacgggataatcttcacagaaaagctaaacagaagcattctcagaaacttctctgtgatgtttgtgttcaactcccagagtttcacattgcttctcatagagtagttctgaaacatgcttttcgtagtgtctgcaagtggacatttggagcgctttcaggcctgtggtggaaaacgaattatggtcacataaaaactggagagaagccttctcagaaacttctctgtgatgattgcattcaactcacagagttgaaccctcctatggatagagcagtgttgaaactctctttttgtggaatctgcaagcggatatgtggacctctccgaagatgtctttggcaacgggaatatcttcacataaaaactaaacagaagcattctcagaaacttcttggtgatgtttgcattcaaatcccagagttgaaccttcctttgagagttcaggtttgcaacactctttttgtaggatctgcaagtggatatttggaccactctgtggccttcgttcgaaacgggtacatcttcgcataaaatctagacagaagcattctcagaaaatactttgtgatgattgagttgaactcacagagctgaacattcctttggatggagcaggtttgagacacactttttgtagaatctacaagtggatatttggacctctctgaggatttcgttggaaacgggataactgcacctaactaaacggaagcattctcagaaactgctttgtgatgattgcattcacctcacagagttgaagattcctattgatagagcagtttggaaacactcttgttgtggaatgtgaaagtggagatttggagcgctttgaggcctatggtagtaaagggaatagcttcatagaaaaactagacagatgcattctcagaaactttttggtgatgtttgtattcaactcccagagttgaactttcctttggaaagagcagctatgaaacactctttttctagaatctgcaagtggacgtttggagggctttgtggtttgtggtggaaaaggaaatatcttcacctaaatactagatagaagcattctcagaagcttctctgtgatgactgcaatcaactcacggagttgaacactccttttgagagcgcagttttgaaactctctttctgtggcatctgcaaagggacatgtagacctctttgaagatttcgttggaaacggaatcatcttcacataaaaactatacagaagcagtctcagaatcttctttgtgatgtttgcattcaaatcccagagttgaactttcctttcaaagttcacgtttgaaacactctttttgcaggatctacaagtggatatttggaccactctgtgtccttcgttcgaaacgggtatatcttcacatgacatctagacagaagctttctcagaaaattgtttgggatgattgatttgaactcacagagctgagcattccttgcgatgtagcagtttagaaacacactttctgcagaatctgcaagtgcatatgtggacctctctgaggaattcgttggaaacgggataatttcagctgactaaacagaagcattctcagaaccttcttcgtgatgtctgcattcaactcacagtgtggaacctttctttgatagttcaggtttgaaacactctttttgtagaaactgcaaggggataattgcactctttgaggagtaccgtagtaaaggaaataacttcctataaaaagaagacagaagcattctcagaaccctcttcgtgatgtttgcattcaactcacagtgctgaacctttctttgatagttcagctttgaaacactctttttgtagaaactgcaaatggatatttggtcctctctgaggatttcgttggaaaagggataaaacgcccagaactaaacagaagcattcacagaaaactcttggtgacgactgagtttaactcacagagctgaacattcctttggatggagcagtttcaaaacacactatttgtagaatctgcaagtggatatgtgggcctctctgaggatttcgttggaaacgggataaaccgcacagaactaaaacagaagcattctcagaaactactttgtgatgattgcattcaagtcacagagttgaacattccctttgacagagcagtttggaaactctctttgtgtagaatctgcaagtggagatatggaccgctttgaggcctatggtagtaaaggaaatagcttcatataaaagctagacagtagcattctcagaaacttctttgtgatgcttgcattcaactcacagagttgaactatcctttcgagagagaagctttgaaatactctttttccagaatctgcaagtggacatttggagggctttgaggcctgtggtggaaaaggaattatcttcctgtaaaagctagatagaagcattgtcagaaacttctttgtgatgattgcattcaactcacaggagttgaaggttccttttcaaacagcagtttccaatcactctttctgtggaatctgcaagtggatatttcgacctctttgaagatttcgttggaaacgggagaatcttcacagaaaagctaaacagaagcattctcagaaacttctctgtgatgtttgtgttcaactcccagagtttcacattgcttttcatagagtagttctgaaacatgcttttcgtagtgtctgcaagtggacatttggagcgctttcaggcctttggtggaaaacgaattatggtcacataaaaactggagagaagccttctcagaaacttctctgtgatgattgcattcaactcacagagttgaaccctcctatggatagagcagtgttgaaactctctttttgtggaatctgcaagtggatatgtggacctctccgaagatgtctttggaaacgggaatatcttcacataaaaactaaacagaagcattctcagaaacttcttggtgatgtttgcattcaaatcccagagttgaaccttcctttgatagttcaggtttgaaacactctttttgtaggatctgcaagtggatatttggaccactctgtggccttcgttcgaaacgggtacatcttcgcataaaatctagacagaagcattctcagaaaatactttgtgatgattgagttaaaatcacagagctgaacattcctttggatggagcaggtttgagacacactttttgtagaatctacaagtggatatttggacctctctgaggatttcgttggaaacgggataactgcacctaactaaacggaagcattctcagaaactgctttgtgatgattgcattcacctcacagagttgaacattcctattgatagagcagtttggaaacactcttgttgtggaatgtgcaagtggagatttggagcgctttgaggcctatggtagtaaagggaatagcttcatagaaaaactagacagatgcattctcaggaactttttggtgatgtttgtattcaactcccagagttgaactttcctttggaaagagcagctatgaaacactctttttctagaatctgcaagtggacgtttggagggctttgtggtttgtggtggaaaaggaaatatcttcacctaaatactagatagaagcattctcagaagcttctctgtgatgactgcattcaactcacggagttgaacactccttttgagagcgcagttttgaaactctctttctgtggcatctgcaaggggacatgtagacctctttgaagatttcgttggaaacggaatcatcttcacataaaaactatacagaagcagtctcagaatcttctttgtgatgtttgcattcaaatcccagagttgaactttcctttcaaagttcacgtttgaaacactctttttgcaggatctacaagtggatatttggaccactctgtgtccttcgttcgaaacgggtatatcttcacacgacatctagacagaagctttctcagaaaattctttgggatgattgagtggaactcacagagctgaacattccttgcgatgtagcagtttagaaacacactttctgcagaatctgcaagtgcatatttggacctctctgaggaattcgttggaaacgggataatttcagctgactaaacagaagcattctcagaaccttcttcgtgatgtctgcattcaactcacagtgtggaacctttctttgatagttcaggtttgaaacactctttttgtagaaactgcaaggggataattgcacttctttgaggcctaccgtagtaaaggaaataacttcctatagaaagaagacagaagcattctcagaaccctcttcgtgatgtttgcattcaactcacagtgctgaacctttctttgatagttcagctttgaaacactcttcttatagaaactgcaagtggatatttggtcctctctgaggatttcgttggaaacgggataaaccgcacagaactaaacagaagaattctcagagccctcttcgtgatgtttgcattcaactcacagtgctgaacctttctttgatagtgcagctttgaaacactctttttgtagaaactgcaagtggatatttggtcctctctgaggatttcgttggaaacgggataaaccgcacagaactaaaacagaagcattcacagaaaactcttggtgacgactgagtttaactcacagagctgaacattcctttggatggagcagtttcgaaacacactatttgtagaatctgcaagtggatatttgggcctctctgaggatttcgttggaaacgggataaaacgcacagaactaaaacagaagcattctcagaaactactttgtgatgattgcattcaagtcacagagttgaacattccctttgacagagcagtttggaaactctctttgtgtagaatctgcaagtggagatatggaccgctttgaggcctatggtagtaaaggaaatagcttcatataaaagctagacagtagcattctcagaaacttctttgtgatgcttgcattcaactcacagagttgaactttcctttcgagagagaagctttgaaacactctttttccagaatgtgcaagtggacatttggggagctttgaggcctggggtggaaaaggaattatcttcccgtaaaagctagatagaagcattgtcagaaacttctttgagatgattgcattcaactcacagagttgaaggttccttttcaaacagcagtttccaatcactctttctgtggaatctgcaagtggatatttcgacctctttgaagatttcgttggaaacgggagaatcttcacagaaaagctaaacagaagcattctcagaaacttctctgtgatgtttgtgttcaactcccagagtttcacgttgcttttcatagagtagttctgaaacatgcttttcgtagtctctgcaagtggacatttggagcgctttcaggcctgtggtggaaaacgaattatggtcacataaaaactggagagaagccttctcagaaacttctctgtgatgattgcattcaactcacagatttgaaccctcctatggatagagcattgttgaaactctctttttgtggaatctgcaagtggatatgtggacctctccgaagatgtctttggaaacgggaatgtcttcacataaaaactaaacaggaagcattctcagaaacttcttggtgatgtttgcattcaaatcccagagttgaaccttcctttgatagttcaggtttgaaacactctttttgtaggatctgcaagtggctatttggaccactctgtggccttctttcgaaacgggtatatcttcgcataaaatctagacagaagcattctcagaaaatactttgtgatgattgagtttaaatcacagagctgaacattcctttggatggagcaggtttgagacacactttttgtagaatctacaagtggatatttggacctctcggaggatttcgttggaaacgggataactgcacctaactaaacggaagcattctcagaaactgctttgtgatgattgcattcacctcacagagttgaacattcctattgatagagcagtttggaaacactcttgttgtggaatgtgcaagtggagatttggagcgctttgaggcctatggtagtaaagggaatagcttcatagaaaaactagacagatgcattctcaggaacattttggtgatgtttgtattcaactcccagagttgaactttcctttggaaagagcagctatgaaacactgtttttctagaatctgcaagtggacgtttggagggctttgtggtttgtggtggaaaaggaaatatcttcacctaaatactagatagaagcattctcagaagcttctctgtgatgactgcattcaactcacggagttgagcactccttttgagaacgcatttttgaaactctctttctgtggcatctgcaaggggacatgtagacctctttgaagatttcgttggaaacggaatcatcttcacataaaaactatacagaagcagtctcagaatcttctttgtgatgtttgcattcaaatcccagagttgaactttcctttcaaagttcacgtttgaaacactctttttgcaggatctacaagtggatatttggaccactctgtgtccttcgttcgaaacgggtatatcttcacatgacatctagacagaagctttctcagaaaattctttgggatgattgagtggaactcacagagctgaacattccttgcgatgtagcagtttagaaacacactttctgcagaatctgcaagtgcatatttggacctctctgaggaattcgttggaaacgggataatttcagctgactaaacagaagcattctcagaaccttcttcgtgatgtctgcattcaactcacagtgtggaacctttctttgatagttcaggtttgaaacactctttttgtagaaactgcaaggggataattgcacttctttgaggcctaccgtagtaaaggaaataacttcctatagaaagaagacagaagcattctcagaaccctcttcgtgatgtttgcattcaactcacagtgctgaaactttctttgatagttcagctttgaaacactcttcttgtagaaactgcaagtggatatttggtcctctctgaggatttcgttggaaacgggataaaccgcacagaactaaacagaagcattctcagaaccttcttcgtgatgtttgcattcaactcacagtgttgaacctttctttgatagttcaggtttgaaacggtctttctgtagaaactgcaagaagatatttggacctctctgaggatttcgttggaaacgggataaaccgcacagaactaaaacagaagcattcacagaaaactcttggtgacgactgagtttaactcacagagctgaacattcctttggatggagcagtttcgaaacacactatttgtagaatgtgcaagtggatatttgggcctctctgaggatttcgttggaaacgggataaaccgcacagaactaaacagaagcattctcagaaactactttgtgatgattgcattcaagtcacagagttgaacattccctttgacagagcagtttggaaactctctttctgtagaatctgcaagtggagatatggaccgctttcaggcctatggtagtaaaggaaatagcttcatataaaagctagacagtagcattctcagaaacttctttgtgatgcttgcattcaactcacagagttgaactttcctttcgagagagaagctttgaaacactctttttccagaatgtgcaagtggacattttgggagctttgaggcctgtggtggaaaaggaattatcttcccgtaaaagctagatagaagcattgtcagaaacttctttgtgatgattgcattcaactcacagagttgaaggttccttttcaaacagcagtttccaatcactctttctgtggaatctgcaagtggatatttgggcctctctgaggatttcgttggaaacgggataaaacgcacagaactaaaacagaagcattctcagaaacttctctgtgatgtttgtgttcaactcccagagtttcacgttgcttttcatagagtagttctgaaacatgcttttcgtagtgtctgcaagtggacatttggagcgctttcaggcctgtggtggaaaacgaattatggtcacataaaaactggagagaagccttctcagaaacttctctgtgatgattgcattcaactcacagagttgaaccctcctatggatagagcagtgttgaaactctctttttgtggaacctgcaagtggatatgtggacctctccgaagatgtctttggaaacgggaatatcttcacataaaaactaaacagaagcattctcagaaacttcttggtgatgtttgcattcaaatcccagagttgaaccttcctttgatagttcaggtttgaaacactctttctgtaggatctgcaagtggctatttggaccactctgtggccttcgttcgaaacgggtatatcttcgcataaaatctagacagaagcattctcagaaaatactttgtgatgattgagtttaaatcacagagctgaccattcctttggatggagcaggtttgagacacactttttgtagaatctacaagtggatatttggacctctctgaggatttcgttggaaacgggataactgcacctaactaaacggaagcattctcagaaactgctttgtgatgattgcattcacctcacagagttgaacattcctattgatagagcagtttggaaacactcttgttgtggaatgtgcaagtggagatttggagcgctttgaggcctgtggtagtaaagggaatagcttcatagaaaaactagacagatgcattctcaggtaactttttggtgatgtttgtattcaactcccagagttgaactttcctttggaaagagcagctatgaaacactctttttctagaatctgcaagtggacgtttggagggctttgtggtttgtggtggaaaaggaaatatcttcacctaaatactagatagaagcattctcagaagcttctctgtgatgactgcattcaactcacggagttgaacactccttttgagagcgcagttttgaaactctctttctgtggcatctgcaaggggacatgtagacctctttgaagatttcgttggaaacggaatcatctaacacataaaaactatacagaagcagtctcagaatcttctttgtgatgtttgcattcaaatccccgagttgaactttcctttcaaagttcacgtttgaaacactctttttgcaggatctacaagtggatatttggaccactctgtgtccgtcgttcgaaacgggtatatcttcacatgacatctagacagaagctttctcagaaaattctttgggatgattgagttgaactcacagagctgagcattccttgcgatgtagcagtttagaaacacactttctgcagaatctgcaagtgcatatttggacctctgtgaggaattcgttggaaacgggataatttcagctgactaaacagaagcattctcagaaccttcttcgtgatgtctgcattcaactcacagtgtggaacctttctttgatagttcaggtttgaaacactctttttgtagaaactgcaaggggataattgcactctttgaggagtaccgtagtaaaggaaataactttctctaaaaagaagacagaagcattctcagaaccctcttcgtgatgtttgcattcaactcacagtgctgaacctttctttgatagttcagctttgaaacactctttttgtagaaactgcaagtggatatttggtcctctctgaggatttcgttggaaacgggataaactgcacagaactaaacagaagcattctcagaaccttcttcgtgatgtttgcattcaactcacagtgttgaacctttctttgatagttcaggttggaaacggtctttctgtagaaactgcaagtagatatttggacctctctgaggatttcgttggaaacgggataacccgcacagaactaaaacagaagcattcacagaaaactcttggtgacgactgagtttaactcacagagctgaacattcctttggatggagcagtttcgaaacacactatttgtagaatgtgcaagtggatatttgggcctctctgaggatttcgttggaaacgggataaaccgcacagaactaaacagaagcattctcagaaactactttgtgatgattgcattcaagtcacagaattgaacattccctttgacagagcagtttggaaactctctttgtgtagaatctgcaagtggagatatggaccgctttgaggcctatggtagtaaaggaaatagcttcatataaaagctagacagtagcattctcagaaacttctttgtgatgcttgcattcaactcacagagttgaactttcctttcgagagagaagctttgaaacactctttttccagaatctgcaagtggacatttggagggctttgaggcctgtggtggaaaaggaattatcttcccgtaaaagctagatggaagcattgtcagaaacttctttgtgatgattgcattcaattcacagagttgaaggttccttttcaaacagcagtttccaatcactctttctgtggaatctgcaagtggatatttggacctattttgaagattttgttggaaacgggataatcttcacagaaaagctaaacagaagcattctcagaacttctctgtgatgtttgtgttcaactcccagagtttcacgttgcttttcatagagtagttctgaaacatgcttttcgtagtgtctgcaagtggacatttggagcgctttcaggcctgtggtggaaaacgaattatggtcacataaaaactggagagaagccttctcagaaacttctctgtgatgattgcattcaactcacagagttgaaccctcctatggatagagcagtgttgaaactctctttttgtggaatctgcaagtggatatgtggacctctccgaagatgtctttggaaacgggaatatcttcacataaaaactaaacagaagcattctcagaaacttcttggtgatgtttgcattcaaatcccagaagttgaaccttcctttgatagttcaggtttgaaacactctttttgtaggatctgcaagtggatatttggaccactctgtggccttcgttcgaaacggctatatcttcgcataaaatctagacagaagcattctcagaaaatactttgtgatgattgagttgaactcacagagctgaacattcctttggatggagcaggtttgagacacactttttgtagaatctacaagtggatatttggacctctctgaggatttcgttggaaacgggataactgcacctaactaaacggaagcattctcagaaactgctttgtgatgattgcattcacctcacagagttgaacattcctattgatagagcagtttggaaacactcttgttgtggaatgttcaagtggagatttggagcgctttgaggcctatggtagtaaagggaagagcttcatagaaaaactagacagatgcattctcaggaactttttggtgatgtttgtattcaactcccagagttgaactttcctttggaaagagcagctatgaaacactctttttctagaatctgcaagtggacgtttggagggctttgtggtttgtggtggaaaaggaaatatcttcacctaaatactagatagaagcattctcagaagcttctctgtgatgactgcattcaactcacggagttgaacactccttttgagagcgcagttttgaaactctctttctgtggcatctgcaaggggacatgtagacctctttgaagatttcgttggaaacggaatcatcttcacataaaaactatacagaagcagtctcagaatcttctttgtgatgtttgcattcaaatcccagagatgaacattcctttcaaagttcacgtttgaaacactctttttgcaggatctacaagtggatatttggaccactctgtgtccttccttcgaaacgggcatatcttcacatgacatctagacagaagctttctcagaaaattctttgggatgattgagtggaactcacagagctgaacattccttgcgatgtagcagtttagaaacacactttctgcagaatctgcaagtgcatatttggacctctctgaggaattcgttggaaacgggataatttcagctgactaaacagaagcattctcagaaccttcttcgtggtgtctgcattcaactcacagtgtggaacctttctttgatagttcaggtttgaaacactctttttgtagaaactgcaaggggataattgcacttctttgaggcctaccgtagtaaaggaaataacttcctatagaaagaagacagaagcattctcagaaccctcttcgtgatgtttgcattcaactcacagtgctgaacctttctttgatagttcagctttgaaacactcttcttgtagaaactgcaagtggatatttggtcctctctgaggatttcgttggaaacgggataaaccgcacagaactaaacagaagaattctcagagccctcttcgtgatgtttgcattcaactcacagtgctgaacctttctttgatagtgcagctttgaaacactctttttgtagaaactgcaagtggatgtttggtcctctctgaggatttcgttggaaacgggataaaccgcacagaactaaaacagaagcattgtcagaaacttctttgtgatgattgcattcaactcacagagttgaaggttccttttcaaacagcagtttccaatcactctttctgtggaatctgcaagtggatatttgggcctctctgaggatttcgttggaaacgggataaaacgcacagaactaaaacagaagcattctcagaaacttctctgtgatgtttgtgttcaactcccagagtttcacgttgcttttcatagagtagttctgaaacatgcttttcgtagtgtctgcaagtggacatttggagcgctttcaggcctgtggtggaaaacgaattatggtcacataaaaactggagagaagccttctcagaaacttctctgtgatgattgcattcaactcacagagttgaaccctcctatggatagagcagtgttgaaactctctttttgtggaatctgcaagtggatatgtggacctctccgaagatgtctttggaaacgggaatatcttcacataaaaactaaacagaagcattctcagaaacttcttggtgatgtttgcattcaaatcccagagttgaaccttcctttgatagttcaggtttgaaacactctttctgtaggatctgcaagtggctatttggaccactctgtggccttcgttcgaaacgggtatatcttcgcataaaatctagacagaagcattctcagaaaatactttgtgatgattgagtttaaatcacagagctgaccattcctttggatggagcaggtttgagacacactttttgtagaatctacaagtggatatttggacctctctgaggatttcgttggaaacgggataactgcacctaactaaacggaagcattctcagaaactgctttgtgatgattgcattcacctcacagagttgaacattcctattgatagagcagtttggaaacactcttgttgtggaatgtgcaagtggagatttggagcgctttgaggcctatggtagtaaagggaatagcttcatagaaaaactagacagatgcattctcaggaactttttggtgatgtttgtattcaactcccagagttgaactttcctttggaaagagcagctatgaaacactctttttctagaatctgcaagtggacgtttggagggctttgtggtttgtggtggaaaaggaaatatcttcacctaaatactagatagaagcattctcagaagcttctctgtgatgactgcattcaactcacggagttgaacactccttttgagagcgcagttttgaaactctctttctgtggcatctgcaaggggacatgtagacctctttgaagatttcgttggaaacggaatcatcttcacataaaaactatacagaagcagtctcagaatcttctttgtgatgtttgcattcaaatcccagagttgaactttcctttcaaagttcacgtttgaaacactctttttgcaggatctacaagtggatatttggaccactctgtgtccttcgttcgaaacgggtatatcttcacacgacatctagacagaagctttctcagaaaattctttgggatgattgagtggaactcacagagctgaacattccttgcgatggagcagtttagaaacacactttctgcagaatctgcaagtgcatatttggacctctctgaggaattcgttggaaacgggataatttcagctgactaaacagaagcattctcagaaccttcttcgtgatgtctgcattcaactcacagtgtggaacctttctttgatagttcaggtttgaaacactctttttgtagaaactgcaaggggataattgcacttctttgaggcctaccgtagtaaaggaaataacttcctatagaaagaagacagaagcattctcagaaccctcttcgtgatgtttgcattcaactcacagtgctgaacctttctttgatagttcagctttgaaacactcttcttgtagaaactgcaagtggatatttggtcctctctgaggatttcgttggaaacgggataaaccgcacagaactaaacagaagaattctcagagccctcttcgtgatgtttgcattcaactcacagtgctgaacctttctttgatagtgcagctttgaaacactctttttgtagaaactgcaagtggatgtttggtcctctctgaggatttcgttggaaacgggataaaccgcacagaactaaaacagaagcattgtcagaaacttctttgtgatgattgcattcaactcacagagttgaaggttccttttcaaacagcagtttccaatcactctttctgtggaatctgcaagtggatatttgggcctctctgaggatttcgttggaaacgggataaaacgcacagaactaaaacagaagcattctcagaaacttctctgtgatgtttgtgttcaactcccagagtttcacgttgcttttcatagagtagttctgaaacatgcttttcgtagtgtctgcaagtggacatttggagcgctttcaggcctgtggtggaaaacgaattatggtcacataaaaactggagagaagccttctcagaaacttccctgtgatgattgcattcaactcacagagttgaaccctcctatggatagagcagtgttgaaactctctttttgtggaatctgcaagtggatatgtggacctctccgaagatgtctttggaaacgggaatatcttcacataaaaactaaacagaagcattctcagaatcttcttggtgatgtttgcattcaaatcccagagttgaaccttcctttgatagttcaggtttgaaacactctttctgtaggatctgcaagtggctatttggaccactctgtggccttcgttcgaaacgggtatatcttcgcataaaatctagacagaagcattctcagaaaatactttgtgatgattgagtttaaatcacagagctgaccattcctttggatggagcaggtttgagacacactttttgtagaatctacaagtggatatttggacctctctgaggatttcgttggaaacgggataactgcacctaactaaacggaagcattctcagaaactgctttgtgatgattgcattcacctcacagagttgaacattcctattgatagagcagtttggaaacactcttgttgtggaatgtgcaagtggagatttggagcgctttgaggcctgtggtagtaaagggaatagcttcatagaaaaactagacagatgcattctcaggaactttttggtgatgtttgtattcaactcccagagttgaactttcctttggaaagagcagctatgaaacactctttttctagaatctgcaagtggacgtttggagggctttgtggtttgtggtggaaaaggaaatatcttcacctaaatactagatagaagcattctcagaagcttctctgtgatgactgcattcaactcacggagttgaacactccttttgagagcgcagttttgaaactctctttctgtggcatctgcaaggggacatgtagacctctttgaagatttcgttggaaacggaatcatcttcacataaaaactatacagaagcagtctcagaatcttctttgtgatgtttgcattcaaatcccagagttgaactttcctttcaaagttcacgtttgaaacactctttttgcaggatctacaagtggatatttggaccactctgtgtccttcgttcgaaacgggtatatcttcacacgacatctagacagaagctttctcagaaaattctttgggatgattgagtggaactcacagagctgaacattccttgcgatgtagcagtttagaaacacactttctgcagaatctgcaagtgcatatttggacctctctgaggaattcgttggaaacgggataatttcagctgactaaacagaagcattctcagaaccttcttcgtgatgtctgcattcaactcacagtgtggaacctttctttgatagttcaggtttgaaacactctttttgtagaaactgcaaggggataattgcacttctttgaggcctaccgtagtaaaggaaataacttcctatagaaagaagacagaagcattctcagaaccctcttcgtgatgtttgcattcaactcacagtgctgaacctttctttgatagttcagctttgaaacactcttcttgtagaaactgcaagtggatatttggtcctctctgaggatttcgttggaaacgggataaaccgcacagaactaaacagaagaattctcagagccctcttcgtgatgtttgcattcaactcacagtgctgaacctttctttgatagtgcagctttgaaacactctttttgtagaaactgcaagtggatgtttggtcctctctgaggatttcgttggaaacgggataaaccgcacagaactaaaacagaagcattgtcagaaacttctttgtgatgattgcattcaactcacagagttgaaggttccttttcaaacagcagtttccaatcactctttctgtggaatctgcaagtggatatttgggcctctctgaggatttcgttggaaacgggataaaacgcacagaactaaaacagaagcattctcagaaacttctctgtgatgtttgtgttcaactcccagagtttcacgttgcttttcatagagtagttctgaaacatgcttttcgtagtgtctgcaagtggacatttggagcgctttcaggcctgtggtggaaaacgaattatggtcacataaaaactggagagaagccttctcagaaacttctctgtgatgattgcattcaactcacagagttgaaccctcctatggatagagcagtgttgaaactctctttttgtggaatctgcaagtggatatgtggacctctccgaagatgtctttggaaacgggaatatcttcacataaaaactaaacagaagcattctcagaaacttcttggtgatgtttgcattcaaatcccagagttgaaccttcctttgatagttcaggtttgaaacactctttctgtaggatctgcaagtggctatttggaccactctgtggccttcgttcgaaacgggtatatcttcgcataaaatctagacagaagcattctcagaaaatactttgtgatgattgagtttaaatcacagagctgaccattcctttggatggagcaggtttgagacacactttttgtagaatctacaagtggatatttggacctctctgaggatttcgttggaaacgggataactgcacctaactaaacggaagcattctcagaaactgctttgtgatgattgcattcacctcacagagttgaacattcctattgatagagcagtttggaaacactcttgttgtggaatgtgcaagtggagatttggagcgctttgaggcctatggtagtaaagggaatagcttcatagaaaaactagacagatgcattctcaggaactttttggtgatgtttgtattcaactcccagagttgaactttcctttggaaagagcagctatgaaacactctttttctagaatctgcaagtggacgtttggagggctttgtggtttgtggtggaaaaggaaatatcttcacctaaatactagatagaagcattctcagaagcttctctgtgatgactgcattcaactcacggagttgaacactccttttgagagcgcagttttgaaactctctttctgtggcatctgcaaggggacatgtagacctctttgaagatttcgttggaaacggaatcatcttcacataaaaactatacagaagcagtctcagaatcttctttgtgatgtttgcattcaaatcccagagttgaactttcctttcaaagttcacgtttgaaacactctttttgcaggatctacaagtggatatttggaccactctgtgtccttcgttcgaaacgggtatatcttcacacgacatctagacagaagctttctcagaaaattctttgggatgattgagtggaactcacagagctgaacattccttgcgatggagcagtttagaaacacactttctgcagaatctgcaagtgcatatttggacctctctgaggaattcgttggaaacgggataatttcagctgactaaacagaagcattctcagaaccttcttcgtgatgtctgcattcaactcacagtgtggaacctttctttgatagttcaggtttgaaacactctttttgtagaaactgcaaggggataattgcacttctttgaggcctaccgtagtaaaggaaataacttcctatagaaagaagacagaagaattctcagaaccctcttcgtgatgtttgcattcaactcacagtgctgaacctttctttgatagttcagctttgaaacactcttcttgtagaaactgcaagtggatatttggtcctctctgaggatttcgttggaaacgggataaaccgcacagaactaaacagaagccttctcagaaacttctctgtgatgattgcattcaactcacagagttgaaggttccttttcaaacagcagtttccaatcactctttctgtggaatctgcaagtggatatttgggcctctctgaggatttcgttggaaacgggataaaacgcacagaactaaaacagaagcattctcagaaacttctctgtgatgtttgtgttcaactcccagagtttcacgttgcttttcatagagtagttctgaaacatgcttttcgtagtgtctgcaagtggacatttggagcgctttcaggcctgtggtggaaaacgaattatggtcacataaaaactggagagaagccttctcagaaacttctctgtgatgattgcattcaactcacagagttgaaccctcctatggatagagcagtgttgaaactctctttttgtggaatctgcaagtggatatgtggacctctccgaagatgtctttggaaacaggaatatcttcacataaaaactaaacagaagcattctcagaaacttcttggtgatgtttgcattcaaatcccagagttgaaccttcctttgatagttcaggtttgaaacactctttctgtaggatctgcaagtggctatttggaccactctgtggccttcgttcgaaacgggtatatcttcgcataaaatctagacagaagcattctcagaaaatactttgtgatgattgagtttaaatcacagagctgaccattcctttggatggagcaggtttgagacacactttttgtagaatctacaagtggatatttggacctctctgaggatttcgttggaaacgggataactgcacctaactaaacggaagcattctcagaaactgctttgtgatgattgcattcacctcacagagttgaacattcctattgatagagcagtttggaaacactcttgttgtggaatgtgcaagtggagatttggagcgctttgaggcctgtggtagtaaagggaatagcttcatagaaaaactagacagatgcattctcaggaactttttggtgatgtttgtattcaactcccagagttgaactttcctttggaaagagcagctatgaaacactctttttctagaatctgcaagtggacgtttggagggctttgtggtttgtggtggaaaaggaaatatcttcacctaaatactagatagaagcattctcagaagcttctctgtgatgactgcattcaactcacggagttgaacactccttttgagagcgcagttttgaaactctctttctgtggcatctgcaaggggacatgtagacctctttgaagatttcgttggaaacggaatcatcttcacataaaaactatacagaagcagtctcagaatcttctttgtgatgtttgcattcaaatcccagagttgaactttcctttcaaagttcacgtttgaaacactctttttgcaggatctacaagtggatatttggaccactctgtgtccttcgttcgaaacgggtatatcttcacacgacatctagacagaagctttctcagaaaattctttggaatgattgagtggaactcacagagctgaacattccttgcgatgtagcagtttagaaacacactttctgcagaatctgcaagtgcatatttggacctctctgaggaattcgttggaaacgggataatttcagctgactaaacagaagcattctcagaaccttcttcgtgatgtctgcattcaactcacagtgtggaacctttctttgatagttcaggtttgaaacactctttttgtagaaactgcaaggggataattgcacttctttgaggcctaccgtagtaaaggaaataacttcctatagaaagaagacagaagcattctcagaaccctcttcgtgatctttgcattcaactcacagtgctgaacctttctttgatagttcagctttgaaacactcttcttgtagaaactgcaagtggatatttggtcctctctgaggatttcgttggaaacgggataaaccgcacagaactaaacagaagaattctcagagccctcttcgtgatgtttgcattcaactcacagtgctgaacctttctttgatagtgcagctttgaaacactccttttgtagaaactgcaagtggatatttggtcctctctgaggatttcgttggaaacgggataaaccgcacagaactaaaacagaagcattgtcagaaacttctttgtgatgattgcattcaactcacagagttgaaggttccttttcaaacagcagtttccaatcactctttctgtggaatctgcaagtggatatttgggcctctctgaggatttcgttggaaacgggataaaacccacagaactaaaacagaagcattctcagaaacttctctgtgatgtttgtgttcaactcccagagtttcacgttgcttttcatagagtagttctgaaacatgcttttcgtagtgtctgcaagtggacatttggagcgctttcaggcctgtggtggaaaacgaattatggtcacataaaaactggagagaagccttctcagaaacttctctgtgatgattgcattcaactcacagagttgaaccctcctatggatagagcagtgttgaaactctctttttgtggaatctgcaagtggatatgtggacctctccgaagatgtctttggaaacgggaatatcttcacataaaaactaaacagaagcattctcagaaacttcttggtgatgtttgcattcaaatcccagagttgaaccttcctttgatagttcaggtttgaaacactctttctgtaggatctgcaagtggctatttggaccactctgtggccttcgttcgaaacgggtatatcttcgcataaaatctagacagaagcattctcagaaaatactttgtgatgattgagtttaaatcacagagctgaccattcctttggatggagcaggtttgagacacactttttgtagaatctacaagtggatatttggacctctctgaggatttcgttggaaacgggataactgcacctaactaaacggaagcattctcagaaactgctttgtgatgattgcattcacctcacagagttgaacattcctattgatagagcagtttggaaacactcttgttgtggaatgtgcaagtggagatttggagcgctttgaggcctatggtagtaaagggaatagcttcatagaaaaactagcacagatgcattctcaggaactttttggtgatgtttgtattcaactcccagagttgaactttcctttggaaagagcagctatgaaacactctttttctagaatctgcaagtggacgtttgtagggctttgtggtttgtggtggaaaaggaaatatcttcacctaaatactagatagaagcattctcagaagctcctctgtgatgactgcattcaactcacggagttgaacactccttttgagagcgcagttttgaaactctctttctgtggcatctgcaaggggacatgtagacctctttgaagatttcgttggaaacggaatcatcttcacataaaaactatacagaagcagtctcagaatcttctttgtgatgtttgcattcaaatcccagagttgaactttcctttcaaagttcacgtttgaaacactctttttgcaggatctacaagtggatatttggaccactctgtgtccttcgttcgaaacgggtataacttcacacgacatctagacagaagctttctcagaaaattctttgggatgattgagtggaactcacagagctgaacattccttgtgatggagcagtttagaaacacactttctgcagaatctgcaagtgcatatttggacctctctgaggaattcgttggaaacgggataatttcagctgactaaacagaagcattctcagaaccttcttcgtgatgtctgcattcaactcacagtgtggaacctttctttgatagttcaggtttgaaacactctttttgtagaaactgcaaggggataattgcactctttgaggagtaccgtagtaaaggaaataacttcctataaaaagaagacagaagcattctcagaaccctcttcgtgatgtttgcattcaactcacagtgctgaacctttctttgatagttcagctttgaaacactctttttgtagaaactgcaagtggatatttggtcctctctgaggaattcgttggaaacgggataaactgcacagaactaaacagaagcattctcagaaccttcttcgtgatgtttgcattcaactcacagtgttgaacctttctttgatagttcaggtttgaaacggtctttctgtagaaactgcaagtagatatttggacctctctgaggatttcgttggaaacgggataacccgcacagaactaaaacagaagcattcacagaaaactcttggtgacgactgagtttaactcacagagctgaacattcctttggatggagcagtttcgaaacacactatttgtagaatgtgcaagtggatatttaggcctctctgaggatttcgttggaaacgggataaaccgcacagaactaaacagaagcattctcagaaactactttgtgatgattgcattcaagtcacagagttgaacattccctttgacagagcagtttggaaactctctttgtgtagaatctgcaagtggagatatggaccgctttgaggcctatggtagtaaaggaaatagcttcatataaaagctagacagtagcattctcagaaacttctttgtgatgcttgcattcaactcacagagttgaactttcctttcgagagagaagctttgaaacactctttttccagaatctgcaagtggacatttggagggctttgaggcctgtggtggaaaaggaattatcttcccgtaaaagctagatagaagcattgtcagaaacttctttgtgatgattgcattcaactcacagagttgaaggttccttttcaaagagcagtttccaatcactctttctgtggaatctgcaagtggatatttggacctattttgaagatttcgttggaaacgggagaatcttcacaggaaagctaaacagaagcattctcagaaacttctctgtgatgtttgtgttcaactcccagagtttcacattgcttttcatagagtagttctgaaacatgcttttcgtagtgtctacaagtggacatttggagcgctttcaggcctgtggtggaaaacgaattatggtcacataaaaactggagagaagccttctcagaaacttctctgtgatgattgcattcaactcacagagttgaaccctcctatggatagagcagtgttgaaactctctttttgtggaatctgcaagtggatatgtggacctctccgaagatgtctttggaaacgggaatatcttcacataaaaactaaacagaagcattctcagaaacttcttggtgatgtttgcattcaaatcccagagttgaaccttcctttgatagttcaggtttgaaacactctttttgtaggatctgcaagtggctatttggaccactctgtggccttcgttcgaaacgggtatatcttcgcataaaatctagacagaagcattctcagaaaatactttgtgatgattgagtttaaatcacagagctgaacattcctttggatggagcaggtttgagacacactttttgtagaatctacaagtggatatttggacctctctgaggatttcgttggaaacgggataactgcacctaactaaacggaagcattctcagaaactgctttgtgatgattgcattcacctcacagagttgaacattcctattgatagagcagtttggaaacactcttgttgtggaatgtgcaagtggagatttggagcgctttgaggcctatggtagtaaagggaatagcttcatagaaaaactagacagatgcattctcaggaactttttggtgatgtttgtattcaactcccagagttgaactttcctttggaaagagcagctatgaaacactctttttctagaatctgcaagtggacgtttggagggctttgtggtttgtggtggaaaaggaaatatcttcacctaaatactagatagaagcattctcagaagcttctctgtgatgactgcattcaactcacggagttgaacactccttttgagagcgcagttttgaaactctctttctgtggcatctgcaaggggacatgtagacctctttgaagatttcgttggaaacggaatcatcttcacataaaaactatacagaagcagtctcagaatcttctttgtgatgtttgcattcaaatcccagagttgaactttcctttcaaagttcacgtttgaaacactctttttgcaggatctacaagtggatatttggaccactctgtgtccttcgttcgaaacgggtatatcttcacacgacatctagacagaagctttctcagaaaattctttgggatgattgagtggaactcacagagctgaacattccttgcgatgtagcagtttagaaacacactttctgcagaatctgcaagtgcatatttggacctctctgaggaattcgttggaaacgggataatttcagctgactaaacagaagcattctcagaacctccttcgtgatgtctgcattcaactcacagtgtggaacctttctttgatagttcaggtttgaaacactctttttgtagaaactgcaaggggataattgcacttctttgaggcctaccgtaataaaggaaataacttcctatagaaagaagacagaagcattctcagaaccctcttcgtgatgtttgcattcaactcacagtgctgaacctttctttgatagttcagctttgaaacactcttcttgtagaaactgcaagtggatatttggtcctctctgaggatttcgttggaaacgggataaaccgcacagaactaaacagaagcattctcaggaccctcttcgtgatgtttgcattcaactcacggtgctgaacctttctttgatagttcagctttgaaacactctttttgtagaaactgcaagtggatatttggtcctctctgaggatttcgttggaaacgggataaaccgcacagaactaaacagaagcattctcagaaccttcttcgtgatgtttgcattcaactcacagtgttgaacctttctttgatagttcaggtttgaaacggtctttctgtagaaactgcaagtagatatttggacctctctgaggatttcattggaaacgggataaaccgcacagaattaaaacagaagcattcacagaaaactcttggtgacgactgagtttaactcacagagctgaacattcctttggatggagcagtttcgaaacacactatttctagaaggtgcaagtggatatgtgggcctctctgaggatttcgttggaaacgggataaaccgcacagaactaaacagaagcattctcagaaactactttgtgatgattgcattcaagtcacagagttgaacattccctttgacagagcagtttggaaactctctttgtgtagaatctgcaagtggagatatggaccgctttgaggcctatggtagtaaaggaaatagcttcatataaaagctagacagtagcattctcagaaacttctttgtgatgcttgcattcaactcacagagttgaactttcctatcgagagagaagctttgaaacactctttttccagagtctgcaagtggacatttggagggctttgaggcctgtggtggaaaaggaattatcttcccgtaaaagctagatagaagcattgtcagaaacttctttgtgatgattgcattcaagtcacagagttgaaggttccttttcaaagagcagtttccaatcactctttctgtggaatctgcaagtggatatttggacctctttgaagatttcgttggaaacgggagaatcttcacagaaaagctaaacagaagcattctcagaaacttctctgtgatgtttgtgttcaactcccagagtttcacattgcttctcatagagtagttctgaaacatgcttttcgtagtgtctgcaagtggacatttggagcgctttcaggcctgtggtggaaaacgaattatggtcacataaaaactggagagaagccttctcagaaacttctctgtgatgattgcattcaactcacagagttgaaccctcctatggatagagcagtgttgaaactctctttttgtggaatctgcaagcggatatgtggacctctccgaagatgtctttggaaacgggaatatcttcacataaaaactaaacagaagcattctcagaaacttcttggtgatgtttgcattcaaatcccagagttgaaccttcctttgagagttcaggtttgaaacactctttttgtaggatctgcaagtggatatttggaccactctgtggccttcgttcgaaacgggtacatcttcgcataaaatctagacagaagcattctcagaaaatactttgtgatgattgagtttaactcacagagctgaacattcctttggatggagcaggtttgagacacactttttgtagaatctacaagtggatatttggacctctctgaggatttcattggaaacgcgataactgcacctaactaaacggaagcattctcagaaactgctttgtgatgattgcattcacctcacagagttgaacattcctattgatagagcagtttggaaacactcttgttgtggaatgtgcaagtggagatttggagcgctttgaggcctatggtagtaaagggaatagcttcatagaaaaactagacagatgcattctcaggaactttttggtgatgtttgtattcaactcccagagttgaactttcctttggaaagagcagctatgaaacactctttttctagaatctgcaagtggacgtttggagggctttgtggtttgtggtggaaaaggaaatatcttcacctaaatactagatagaagcattctcagaagcttctctgtgatgactgcattcaactcacggagttgaacactccttttgagagcgcagttttgaaactctccttctgtggcatccgcaaggggacatgtggacctctttgaagatttcgttggaaacggaatcatcttcacataaaaactatacagaagcagtctcagaatcttctttgtgatgtttgcattcaaatcccagagttgaactttcctttcaaagttcacgtttgaaacactctttttgcaggatctacaagtggatatttggaccactctgtgtccttcgttcgaaacgggtatatcttcacatgacatctagacagaagctttctcagaaaattctttgggatgattgagtggaactcacagagctgaacattccttgcgatgtagcagtttagaaacacactttctgcagaatctgcaagtgcatatttggacctctctgaggaattcgttggaaacgggataatttcagctgactaaacagaagcattctcagaaccttcttcgtgatgtctgcattcaactcacagtgtggaacctttctttgatagttcaggtttgaaacactctttttgtagaaactgcaaggggataattgcacttctttgaggcctaccgtagtaaaggaaataacttcctatagaaagaagacagaagcattctcagaaccctcttcgtgatgtttgcattcaactcacagtgctgaacctttctttgatagttcagctttgaaacactcttcttgtagaaactgcaagtggatatttggtcctctctgaggatttcgttggaaacgggataaaccgcacagaactaaacagaagaattctcagagccctcttcgtgatgtttgcattcaactcacagtgctgaacctttctttgatagtgcagctttgaaacactctttttgtagaaactgcaagtggatgtttggtcctctctgaggatttcgttggaaacgggataaaccgcacagaactaaaacagaagcattgtcagaaacttctttgtgatgattgcattcaactcacagagttgaaggttccttttcaaacagcagtttccaatcactctttctgtggaatctgcaagtggatatttgggcctctctgaggatttcgttggaaacgggataaaacgcacagaactaaaacagaagcattctcagaaacttctctgtgatgtttgtgttcaactcccagagtttcacgttgcttttcatagagtagttctgaaacatgcttttcgtagtgtctgcaagtggacatttggagcgctttcaggcctgtggtggaaaacgaattatggtcacataaaaactggagagaagccttctcagaaacttctctgtgatgattgcattcaactcacagagttgaaccctcctatggatagagcagtgttgaaactctctttttgtggaatctgcaagtggatatgtggacctctccgaagatgtctttggaaacgggaatatcttcacataaaaactaaacagaagcattctcagaaacttcttggtgatgtttgcattcaaatcccagagttgaaccttcctttgatagttcaggtttgaaacactctttttgtaggatctgcaagtggctatttggaccactctgtggccttcgttcgaaactggtatatcttcgcataaaatctagacagaagcattctcagaaaatactttgtgatgattgagtttaaatcacagagctgaccattcctttggatggagcaggtttgagacacactttttgtagaatctacaagtggatatttggacctctctgaggatttcgttggaaacgggataactgcacctaactaaacggaagcattctcagaaactgctttgtgatgattgcattcacctcacagagttgaacattcctattgatagagcagtttggaaacactcttgttgtggaatgtgcaagtggagatttggagcgctttgaggcctatggtagtaaagggaatagcttcatagaaaaactagacagatgcattctcaggaaccttttggtgatgtttgtattcaactcccagagttgaactttcctttggaaagagcagctatgaaacactctttttctagaatctgcaagtggacgtttggagggctttgtggtttgtggtggaaaaggaaatatcttcacctaaatactagatagaagcattctcagaagcttctctgtgatgactgcattcaactcacggagttgaacactccttttgagagcgcagttttgaaactctctttctgtggcatctgcaaggggacatgtagacctctttgaagatttcgttggaaacggaatcatcttcacataaaaactatacagaagcagtctcagaatcttctttgtgatgtttgcattcaaatcccagagttgaactttcctttcaaagttcacgtttgaaacactctttttgcaggatctacaagtggatatttggaccactctgtgtccttcgttcgaaacgggtatatcttcacacgacatctagacagaagctttctcagaaaattctttgggatgattgagtggaactcacagagctgaacattccttgcgatgtagcagtttagaaacacactttctgcagaatctgcaagtgcatatttggacctctctgaggaattcgttggaaacgggataatttcagctgactaaacagaagctttctcagaaaattctttgggatgattgagttgagcaaacagagctgaacactccttgcgatgtagcagtttagaaacaccctttctgcagaatctgcaagtgcatatttggacctctctgaggaattcgttggaaacgggataatttcagctgactaaacagaagcattctcagaaccttcttcgtgatgtctgcattcaactcaaagtgtggaacctttctttgatagttcaggttttaaaaactctttttgtagaaactgcaaggggataattgcactcttgaggagtaccgtagtaaaggaaataacttcctataaaaagaagacagaagcattctcagaaccctcttcgtgatgtttgcattcaactcacagtgctgaacctttgtttgatagttcagctttgaaacactctttttgtagaaactgcaagtgaatatttggtcctctctgaggatttcgttggaaacgggataaaccgcacagaactaaacagaagcattctcagaaccttcttcgtgatgtttgcattcaactcacagtgttgaacctttctttgatagttcaggtttgaaacggtctttctgtagaaactgcaagtagatatttggacctctctgaggatttcgttggaaacgggatacaccgcacagaactaaaacagaagcattcacagaaaactctttgtgacgactgcgtttaactcacagagctgaaaatccctttggatggagcagtttcgaaaaacactatttgtagaatgtgcaagtggatattggggcctctctgaggatttcgttggaaacgggataaaccacacagaactaaacagaagcattctcagaaactacttcgtgatgattgcattcaagtcacagagttgaacattccctttgacagagcagtttggaaactctctttgtgtagaatctgcaagtggagatatggaccgctttgaggactatggtagtaaaggaaatagcttcatataaaagctaaacagtagcattctcagaaacttctttgtgatgcttgcattcaactcacagagttgaactttcctatcgagagagaagctttgaaacactctttttccagaatctgcaagtggacatttggagggctttgaggcctgtggtggaaaaggaattatcttcccgtaaaagctagatagaagcattgtcagaaacttctttgtgatgattgcattcaactcacagagttgaaggttccttttcaaacagcagtttccaatcactctttctgtggaatctgcaagtggatatttggacctctttgaagatttcgttggaaacgggagaatcttcacagaaaagctaaacagaagcattctcagaaacttctctgtgatgtttgtgttcaactcccagagtttcacattgcttttcatagagtagttctgaaacatgcttttcgtagtgtctgcaagtggacatttggagcgctttcaggcctgtggtggaaaacgaattatggtcacataaaaactggagagaagccttctcagaaacttctctgtgatgattgcattcaactcacagagttgaaccctcctatggatagagcagtgttgaaactctctttttgtggaatctgcaagtggatatgtggacctctccgaagatgtctttggaaacgggaatatcttcacataaaaactaaacagaagcattctcagaaacttcttggtgatgtttgcattcaaatcccagagttgaaccttcctttgatagttcaggtttgaaacactctttctgtaggatctgcaagtggctatttggaccactctgtggccttcgttcgaaacgggtatatcttcgcataaaatctagacagaagcattctcagaaaatactttgtgatgattgagtttaaatcacagagctgaccattcctttggatggagcaggtttgagacacactttttgtagaatctacaagtggatatttggacctctctgaggatttcgttggaaacgggataactgcacctaactaaacggaagcattctcagaaactgctttgtgatgattgcattcacctcacagagttgaacattcctattgatagagcagtttggaaacactcttgttgtggaatgtgcaagtggagatttggagcgctttgaggtctatggtagtaaagggaatagcttcatagaaaaactagacagatgcattctcaggaaccttttggtgatgtttgtattcaactcccagagttgaactttcctttggaaagagcagctatgaaacactctttttctagaatctgcaagtggacgtttggagggctttgtggtttgtggtggaaaaggaaatatcttcacctaaatactagatagaagcattctcagaagcttctctgtgatgactgcattcaactcacggagttgaacactccttttgagagcgcagttttgaaactctctttctgtggcatctgcaaggggacatgtagacctctttgaagatttcgttggaaacggaatcatcttcacataaaaactatacagaagcagtctcagaatcttctttgtgatgtttgcattcaaatcccagagttgaactttcctttcaaagttcacgtttgaaacactctttttgcaggatctacaagtggatatttggaccactctgtgtccttcgttcgaaacgggtatatcttcacacgacatctagacagaagctttctcagaaaattctttgggatgattgagtggaactcacagagctgaacattccttgcgatgtagcagtttagaaacacactttctgcagaatctgcaagtgcatatttggacctctctgaggaattcgttggaaacgggataatttcagctgactaaacagaagcattctcagaaccttcttcgtgatgtctgcattcaactcacagtgtggaacctttctttgatagttcaggtttgaaacactctttttgtagaaactgcaaggggataattgcacttctttgaggcctaccgtagtaaaggaaataacttcctatagaaagaagacagaagcattctcagaaccctcttcgtgatgtttgcattcaactcacagtgctgaacctttctttgatagttcagctttgaaacactcttcttgtagaaactgcaagtggatatttggtcctctctgaggacttcgttggaaacgggataaaccgcacagaactaaacagaagaattctcagagccctcttcgtgatgtttgcattcaactcacagtgctgaacctttctttgatagtgcagctttgaaacactcttcttgtagaaactgcaagtggatgtttggtcctctctgaggatttcgttggaaacgggataaaccgcacagaactaaaacagaagcattgtcagaaacttctttgtgatgattgcattcaactcacagagttgaaggttccttttcaaacagcagtttccaatcactctttctgtggaatctgcaagtggatatttgggcctctctgaggatttcgttggaaacgggataaaacgcacagaactaaaacagaagcattctcagaaacttctctgtgatgtttgtgttcaactcccagagtttcacgttgcttttcatagagtagttctgaaacatgcttttcgtagtgtctgcaagtggacatttggagcgctttcaggcctgtggtggaaaacgaattatggtcacataaaaactggagagaagccttctcagaaacttctctgtgatgattgcattcaactcacagagttgaaccctcctatggatagagcagtgttgaaactctctttttgtggaatctgcaagtggatatgtggacctctccgaagatgtctttggaaacgggaatatcttcacataaaaactaaacagaagcattctcagaaacttcttggtgatgtttgcattcaaatcccagagttgaaccttcctttgatagttcaggtttgaaacactctttctgtaggatctgcaagtggctatttggaccactctgtggccttcgttcgaaacgggtatatcttcgcataaaatctagacagaagcattctcagaaaatactttgtgatgattgagtttaaatcacagagctgaccattcctttggatggagcaggtttgagacacactttttgtagaatctacaagtggatatttggacctctctgaggatttcgttggaaacgggataactgcacctaactaaacggaagcattctcagaaactgctttgtgatgattgcattcacctcacagagttgaacattcctattgatagagcagtttggaaacactcttgttgtggaatgtgcaagtggagatttggagcgctttgaggcctatggtagtaaagggaatagcttcatagaaaaactagacagatgcattctcaggaactttttggtgatgtttgtattcaactcccagagttgaactttcctttggaaagagcagctatgaaacactctttttctagaatctgcaagtggacgtttggagggctttgtggtttgtggtggaaaaggaaatatcttcacctaaatactagatagaagcatcctcagaagcttctctgtgatgactgcattcaactcacggagttgaacactccttttgagagcgcagttttgaaactctctttctgtggcatctgcaaggggacatgtagacctctttgaagatttcgttggaaacggaatcatcttcacataaaaactatacagaagccgtctcagaatcttcttcgtgatgtttgcattcaaatcccagagttgaactttcctttcaaagttcacgtttgaaacactctttttgcaggatctacaagtggatatttggaccactctgtgtccttcgttcgaaacgggtatatcttcacatgacatctagacagaagctttctcagaaaattctttgggatgattgagttgaactcacagagctgagcattccttgcgatgtagcagtttagaaacacactttctgcagaatctgcaagtgcatatttggacctctctgaggaattcgttggaaacgggataatttcagctgactaaacagaagcattctcagaaccttcttcgtgatgtctgcattcaacacaaagtgtggaacctttctttgatagttcaggttttaaaaactctttttgtagaaactgcaaggggataattgcactctttgaggagtaccgtagtaaaggaaataacttcctataaaaagaagacagaagcattctcagaaccctcttcgtgatgtttgcattcaactcacagtgctgaacctttctttgatagttcagctttgaaacactctttttgtagaaactgcaagtgaatatttggtcctctctgaggatttcgttggaaacaggataaaacgcacagaactaaacagaagcattctcagaaccttcttcgtgatgtttgcattcaactcacagtgttgaacctttctttgatagttcaggtttgaaacggtctttctgtagaaactgcaagtagatatttggacctctctgaggatttcgttggaaacgggataacccgcacagaactaaaacagaagcattcacagaaaactcttggtgacgactgagtttaactcacagagctgaacattcctttggatggagcagtttcgaaacacactatttgtagaatgtgcaagtggatatttaggcctctctgaggatttcgttggaaacgggataaaccgcacagaactaaacagaagcattctcagaaactactttgtgatgattgcattcaagtcacagagttgaacattccctttgacagagcagtttggaaactctctttgtgtagaatctgcaagtggagatatggaccgctttgaggcctatggtagtaaaggaaatagcttcatataaaagctagacagtagcattctcagaaacttctttgtgatgcttgcattcaactcacagagttgaactttcctttcgagagagaagctttgaaacactctttttccagaatctgcaagtggacatttggagggctttgaggcctgtggtggaaaaggaattatcttcccgtaaaagctagatagaagcattgtcagaaacttctttgtgatgattgcattcaactcacagagttgaaggttccttttcaaagagcagtttccaatcactctttgtgtggaatctgcaagtggatatttggacctattttgaagatttcgttggaaacgggagaatcttcacaggaaagctaaacagaagcattctcagaaacttctctgtgatgtttgtgttcaactcccagagtttcacattgcttttcatagagtagttctgaaacatgcttttcgtagtgtctacaagtggacatttggagcgctttcaggcctgtggtggaaaacgaattatggtcacataaaaactggagagaagccttctcagaaacttctctgtgatgattgcattcaactcacagagttgaaccctcctatggatagagcagtgttgaaactctctttttgtggaatctgcaagtggatatgtggacctctccgaagatgtctttggaaacgggaatatcttcacataaaaactaaacagaagcattctcagaaacttcttggtgatgtttgcattcaaatcccagagttgaaccttcctttgatagttcaggtttgaaacactctttttgtaggatctgcaagtggatatttggaccactctgtggccttcgttcgaaacgggtatatcttcgcataaaatctagacagaagcattctcagaaaatactttgtgatgattgagtttaactcacagagctgaacattcctttggatggagcaggtttgagacacaccttttgtagaatctacaagtggatatttggacctctctgaggatttcgttggaaacgggataactgcacctaactaaacggaagcattctcagaaactgctttgtgatgattgcattcacctcacagagttgaacattcctattgatagagcagtttggaaacactcttgttgtggaatgtgcaagtggagatttggagcgctttgaggcctatggtagtaaagggaatagcttcatagaaaaactagacagatgcattctcaggaactttttggtgatgtttgtattcaactcccagagttgaactttcctttggaaagagcagctatgaaacactgtttttctagaatctgcaagtggacgtttggagggctttgtggtttgtggtggaaaaggaaatatcttcacctaaatactagatagaagcatcctcagaagcttctctgtgatgactgcattcaactcacggagttgaacactccttttgagagcgcagttttgaaactctctttctgtggcatctgcaaggggacatgtagacctctttgaagatttcgttggaaacggaatcatcttcacataaaaactacacagaagcagtctcagaatcttctttgtgatgtttgcattcaaatccccgagttgaactttcctttcaaagttcacgtttgaaacactctttttgcaggatctacaagtggatatttggaccactctgtgtccttcgttcgaaacgggtatatcttcacatgacatctagacagaagctttctcagaaaattctttgggatgattgagttgaactcacagagctgagcattccttgcgatgtagcagtttagaaacacactttctgcagaatctgcaagtgcatatttggacctctgtgaggaattcgttggaaacgggataatttcagctgactaaacagaagcattctcagaaccttcttcgtgatgtctgcattcaactcacagtgtggaacctttctttgatagttcaggtttgaaacactctttttgtagaaactgcaaggggataattgcactctttgaggagtaccgtagtaaaggaaataacttcctataaaaagaagacagaagcattctcagaaccctcttcgtgatgtttgcattcaactcacagtgctgaacctttctttgatagttcagctttgaaacactctttttgtagaaactgcaagtggatatttggtcctctctgaggaattcgttggaaacgggataaactgcacagaactaaacagaagcattctcagaaccttcttcgtgatgtttgcattcaactcacagtgttgaacctttctttgatagttcaggtttgaaacggtctttctgtagaaactgcaagtagatatttggacctctctgaggatttcgttggaaacgggataacccgcacagaactaaaacagaagcattcacagaaaactcttggtgacgactgagtttaactcacagagctgaacattcctttggatggagcagtttcgaaacacactatttgtagaatgtgcaagtggatatttaggcctctctgaggatttcgttggaaacgggataaaccgcacagaactaaacagaagcattctcagaaactactttgtgatgattgcattcaagtcacagagttgaacattccctttgacagagcagtttggaaactctctttgtgtagaatctgcaagtggagatatggaccgctttgaggcctatggtagtaaaggaaatagcttcatataaaagctagacagtagcattctcagaaacttctttgtgatgcttgcattcaactcacagagttgaactttcctttcgagagagaagctttgaaacactctttttccagaatctgcaagtggacatttggagggctttgaggcctgtggtggaaaaggaattatcttcccgtaaaagctagatagaagcattgtcagaaacttctttgtgatgattgcattcaactcacagagttgaaggttccttttcaaagagcagtttccaatcactctttctgtggaatctgcaagtggatatttggacctattttgaagatttcgttggaaacgggataatcttcacagaaaagctaaacagaagcattctcagaaacttctctgtgatgtttgtgttcaactcccagagtttcacattgcttttcatagagtagttctgaaacatgcttttcgtagtgtctacaagtggacatttggagcgctttcaggcctgtggtggaaaacgaattatggtcacataaaaactggagagaagccttctcagaaacttctctgtgatgattgcattcaactcacagagttgaaccctcctatggatagagcagtgttgaaactctctttttgtggaatctgcaagtggatatgtggacctctccgaagatgtctttggaaacgggaatatcttcacataaaaactaaacagaagcattctcagaaacttcttggtgatgtttgcattcaaatcccagagtcgaaccttcctttgatagttcaggtttgaaacactctttttgtaggatctgcaagtggatatttggaccactctgtggccttcgttcgaaacgggtacatcttcgcataaaatctagacagaagcattctcagaaaatactttgtgatgattgagtttaactcacagagctgaacattcctttggatggagcaggtttgagacacactttttgtagaatctacaagtggatatttggacctctctgaggatttcgttggaaacgggataactgcacctaactaaacggaagcattctcagaaactgctttgtgatgattgcattcacctcacacagttgaccattcctattgatagagcagtttagaaacactcttgttgtggaatgtgcaagtggagatttggagcgctttgaggcctatggtagtaaagggaatagcttcatagaaaaactagacagatgcattctcaggaactttttggtgatgtttgtattcaactcccagagttgaactttcctttggaaagagcagctatgaaacactctttttctagaatctgcaagtggacgtttggagggctttgtggtttgtggtggaaaaggaaatatcttcacctaaatactagatagaagcattctcagaagcttctctgtgatgactgcattcaactcacggagttgaacactccttttgagagcgcagttttgaaactctctttctgtggcatccgcaaggggacatgtggacctctttgaagatttcgttggaaacggaatcatcttcacataaaaactatacagaagcagtctcagaatcttctttgtgatgtttgcattcaaatcccagagttgaactttcctttcaaagttcacgtttgaaacactctttttgcaggatctacaagtggatatttggaccactctgtgtccttcgttcgaaacgggtatatcttcacatgacatctagacagaagctttctcagaaaattctttgggatgattgagtggaactcacagagctgaacattccttgcgatgtagcagtttagaaacacactttctgcagaatctgcaactgcatatttggacatctctgaggaattctttggaaacgggataatttcagctgactaaacagaagcattctcagaaccttcttcgtgatgtctgcattcaactcacagtgtggaacctttctttgatagttcaggtttgaaacactctttttgtagaaactgcaaggggataattgcacttctttgaggcctaccgtagtaaaggaaataacttcctatagaaagaagacagaagcattctcagaaccctcttcgtgatgtttgcattcaactcacagtgctgaacctttctttgatagttcagctttgaaacactcttcttgtagaaactgcaagtggatatttggtcctctctgaggatttcgttggaaacgggtaaaccgcacagaactaaacagaagaattctcagagccctcttcgtgatgtttgcattcaactcacagtgctgaacctttctttgatagtgcagctttgaaacactctttttgtagaaactgcaagtggatatttggtcctctctgaggatttcgttggaaacgggataaaccgcacagaactaaaacagaagcattgtcagaaacttctttgtgatgattgcattcaactcacagagttgaaggttccttttcaaacagcagtttccaatcactctttctgtggaatctgcaagtggatatttgggcctctctgaggatttcgttggaaacgggataaaacccacagaactaaaacagaagcattctcagaaacttctctgtgatgtttgtgttcaactcccagagtttcacgttgcttttcatagagtagttctgaaacatgcttttcgtagtgtctgcaagtggacatttggagcactttcaggcctgtggtagaaaacgaattatggtcacataaaaactggagagaagccttctcagaaacttctctgtgatgattgcattcaactcacagagttgaaccctcctatggatagagcagtgttgaaactctctttttgtggaatctgcaagtggatatgtggacctctccgaagatgtctttggaaacgggaatatcttcacataaaaactaaacagaagcattctcagaaacttcttggtgatgtttgcattcaaatcccagagttgaaccttcctttgatagttcaggtttgaaacactctttctgtaggatctgcaagtggctatttggaccactctgtggccttcgttcgaaacgggtatatcttcgcataaaatctagacagaagcattctcagaaaatactttgtgatgattgagtttaaatcacagagctgaccattcctttggatggagcaggtttgagacacactttttgtagaatctacaagtggatatttggacctctctgaggatttcgttggaaacgggataactgcacctaactaaacggaagcattctcagaaactgctttgtgatgattgcattcacctcacagagttgaacattcctattgatagagcagtttggaaacactcttgttgtggaatgtgcaagtggagatttggagcgctttgaggcctatggtaataaagggaatagcttcatagaaaaactagacagatgcattctcaggaactttttggtgatgtttgtattcaactcccagagttgaactttcctttggaaagagcagctatgaaacactctttttctagaatctgcaagtggacgtttggagggctttgtggtttgtggtggaaaaggaaatatcttcacctaaatactagatagaagcattctcagaagcttctctgtgatgactgcattcaactcacggagttgaacactccttttgagagcgcagttttgaaactctctttctgtggcatctgcaaggggacatgtagacctctttgaagatttcgttggaaacggaatcatcttcacataaaaactatacagaagcagtctcagaatcttctttgtgatgtttgcattcaaatcccagagttgaactttcctttcaaagttcacgtttgaaacactctttttgcaggatctacaagtggatatttggaccactctgtgtccttcgttcgaaacgggtatatcttcatatgacatctagacagaagctttctcagaaaattctttgggatgattgagttgaactcacagagctgaacattccttgtgatggagcagtttagaaacacactttctgtagaatctgcaagtgcatatttggacctctctgaggaattcgttggaaacgggataatttcagctgactaaacagaagcattctcagaaccttcttcgtgatgtctgcattcaactcacagtgtggaacctttctttgatagttcaggtttgaaacactctttttgtagaaactgcaaggggataattgcacttctttgaggcctaccgtagtaaaggaaataacttcctatagaaagaagacagaagcattctcagaaccctcttcgtgatgtttgcattcaactcacagcgctgaaactttctttgatagttcagctttgaaacactcttcttgtagaaactgcaagtggatatttggtcctctctgaggatttcgttggaaacgggataaaccacacagaactaaacagaagcattctcagaaccttcttcgtgatgtttgcattcaactcacagtgttgaacctttctttgatagttcaggtttcaaacggtctttctgtagaaactgcaagaagatatttggacctctctgaggatttcgttggaaacgggataaaccgcacagaactaaaacagaagcattcacagaaaactcttggtgacgactgagtttaactcacagagctgaacattcctttggatggagcagtttcgaaacacactatttgtagaatgtgcaagtggatatttgggcctctctgaggatttcgttggaaacgggataaaccgcacagaactaaacagaagcattctcagaaactactttgtgatgattgcattcaagtcacagagttgaacattccctttgacagagcagtttggaaactctctttgtgtagaatctgcaagtggagatatggaccgctttgaggcctatggtagtaaaggaaatagcttcatataaaagctagacagtagcattctcagaaacttctttgtgatgcttgcattcaactcacagagttgaactttcctttcgagagagaagctttgaaacactctttttccagaatctgcaagtggacatttggagggctttgaggcctgtggtggaaaaggaattaacttcccgtaaaagctagatagaagcattgtcagaaacttctttgtgatgattgcattcaactcacagagatgaaggttcctttacaaacagcagtttccaaacactctttctgtggaatctgcaagtggatatttggacctctttgaagatttcgttggaaacgggagaatcttcacagaaaagctaaacagaagcattctcagaaacttctctgtgatgtttgtgttcaactcccagagtttcacattgcttttcatagagtagttctgaaacatgcttttcgtagtgtctgcaagtggacatttggagtgctttcaggcctgtggtggaaaacgaattatggtcccataaaaactggagagaagccttctcagaaacttctctgtgatgattgcattcaactcacagatttgaaccctcctatggatagagcattgttgaaactctctttttgtggaatctgcaagtggatatgtggacctctccgaagatgtctttggaaacgggcatatcttcacataaaaactaaacagaagcattctcagaaacttcttggtgatgtttgcattcaaatcccagagttgaaccttcctgtgatagttcaggtttgaaacactctttttgtaggatctgcaagtggatatttggaccactctgtggccttcgttcgaaacgggtacatcttcacataaaatctagacagaagcattctcagaaaatactttgtgatgattgagtttaactcacagagctgaacattcctttggatggagcaggtttgagacacactttttgtagaatctacaagtggatatttggacctctctgaggatttcgttggaaacgcgataactgcacctaactaaacggaagcattctcagaaactgctttgtgatgattgcattcacctcacagagttgaacattcctattgatagagcagtttggaaacactcttgttgtggaatgtgcaagtggagatttggagcgctttgaggcctatggtagtaaagggaatagcttcatagaaaaactagacagatgcattctcaggaactttttggtgatgtttgtattcaactcccagagttgaactttcctttggaaagagcagctatgaaacactgtttctctagaatctgcaagtggacgtttggagggctttgtggtttgtggtggaaaaggaaatatcttcacctaaatactagatagaagcattctcagaagcttctctgtgatgactgcattcaactcagggagttgaacactccttttgagagcgcagttttgaaactctctttctgtggcatctgcaaggggacatgtagacctctttgaagatttcgttggaaacggaatcatcttcacataaaaactatacagaagcagtctcagaatcttctttgtgatgtttgcattcaaatccccgagttgaactttcctttcaaagttcacgtttgaaacactctttttgcaggatctacaagtggatatttggaccactctgtgtccttcgttcgaaacgggtatatcttcacatgacatctagacagaagctttctcagaaaattctttgggatgattgagttgaactcacagagctgagcattccttgcgatgtagcagtttagaaacacactttctgcagaatctgcaagtgcatatttggacctctctgaggaattcgttggaaacgggataatttcagctgactaaacagaagcattctcagaaccttcttcgtgatgtctgcattcaactcacagtgtggaacctttctttgatagttcaggtttgaaacactctttctgtagaaactgcaaggggataattgcactctttgaggagtaccgtagtaaaggaaataacttcctataaaaagaagacagaagcattctcagaaccctcttcgtgatgtttgcattcaactcacagtgctgaatctttctttgatagttcagctatgaaacactctttttgtagaaactgcaagtggatatttggtcctctctgagcatttcgttggaaacgggataaactgcacagaactaaacagaagcattctcagaaccttcttcgtgatgtttgcattcaactcacagtgttgaacctttctttgatagttcaggtttgaaacggtctttctgtagaaactgcaagtagatatttggacctctctgaggatttcgttggaaacgggataacccgcacagaactaaaacagaagcattcacagaaatctcttggtgacgactgagtttaactcacagagctgaacattcctttggatggagcagtttcgaaacacactatttgtagaatgtgcaagtggatatgtgggcctctctgaggatttcgttggaaacgggataaaccgcacagaactaaacagaagcattctcagaaactactttgtgatgattgcattcaagtcacagagttgaacattccctttgacagagcagtttggaaactctctttgtgtagaatctgcaagtggagatatggaccgctttgaggcctatggtagtaaaggaaatagcttcatataaaagctagacagtagcattctcagaaacttctttgtgatgcttgcattcaactcacagagttgaactttcctttcgagagagaagctttgaaacactctttttccagaatctgcaagtggacatttggagggctttgaggcctgtggtggaaaaggaattatcttcccgtaaaagctagatagaagcattgtcagaaacttctttgtgatgattgcattcaactcacagagttgaaggttccttttcaaagagcagtttccaatcactctttgtgtggaatctgcaagtggatatttggacctattttgaagatttcgttggaaacgggagaatcttcacaggaaagctaaacagaagcattctcagaaacttctctgtgatgtttgtgttcaactcccagagtttcacattgcttttcatagagtagttctgaaacatgcttttcgtagtgtctacaagtggacatttggagcgctttcaggcctgtggtggaaaacgaattatggtcacataaaaactggagagaagccttctcagaaacttctctgtgatgattgcattcaactcacagagttgaaccctcctatggatagagcagtgttgaaactctctttttgtggaatctgcaagtggatacgtggacctctccgaagatgtctttggaaacgggaatatcttcacataaaaactaaacagaagcattctcagaaacttcttggtgatgtttgcattcaaatcccagagttgaaccttcctttgatagttcaggtttgaaacactctttttgtaggatctgcaagtggatatttggaccactctgtggccttcgttcgaaacgggtatatcttcgcataaaatctagacagaagcattctcagaaaatactttgtgatgattgagtttaactcacagagctgaacattcctttggatggagcaggtttgagacacactttttgtagaatctacaagtggatatttggacctctctgaggatttcgttggaaacgggataactgcacctaactaaacgggaagcattctcagaaactgctttgtgatgattgcattcacctcacagagttgaacattcctattgatagagcagtttggaaacactcttgttgtggaatgtgcaagtggagatttggagcgctttgaggcctatggtagtaaagggaatagcttcatagaaaaactagacagatgcattctcaggaactttttggtgatgtttgtattcaactcccagagttgaactttcctttggaaagagcagctatgaaacactctttttctagaatctgcaagtggacgtttggagggctttgtggtttgtggtggaaaaggaaatatcttcacctaaatactagatagaagcattctcagaagcttctctgtgatgactgcattcaactcacggagttgaacactccttttgagagcgcagttttgaaactctctttctgtggcatctgcaaggggacatgtagacctctttgaagatttcgttggaaacggaatcatcttcacataaaaactatacagaagcagtcccagaatcttctttgtgatgtttgcattcaaatcccagagttgaactttcctttcaaagttcacgtttgaaacactctttttgcaggatctacaagtcgatatttggaccactctgcgtccttcgttcgaaacgggtatatcttcacatgacatctagactgaagctttctcagaaaattctttgggatgattgagttgagcaaacagagctgaacactccttgcgatgtagcagtttagaaacacactttctgcagaatctgcaagtgcatatgtggacctctctgaggaattcgttggaaataggataatttcagctgactaaacagaagcattctcagaaccttcttcgtgatgtctgcattcaactcacagtgtggaacctttctttgatagttcaggtttgaaacactctttttggagaaactgcaaggggatcattgcacttctttgaggcctaccgtagtaaaggagataacttcctataaaaagaagacagaagcattctcagaaccctcttcgtgatgtttgcattcaactcacggtgctgaacctttctttgatagttcagctttgaaacactctttttgttgaaactgcaattggatatttggtcctctctgaggatttcgttggaaacgggataaaccgcacagaactaaacagaagcattctcagaaccttcttcgtgatgtttgcattcaactcacagtgttgaacctttctttgatagttcaggtttgaaacggtctttctgtagaaactgcaagtagatatttggacctctctgaggatttcgttggaaacgggataaaccgcacagaactaaaacagaagctttcacagaaaactcttggtgacgactgagtttaactcacagagctgaacattcctttggatggagcagtttcgaaacacactatttgtagaatgtgcaagtggatatgtgggcctctctgaggatttcgttggaaacgggataaaccgcccagaactaaacagaagcattctcagaaactactttgtgatgattgcattcaagtcacagagttgaacattccctttgacagagcagtttggaaactctctttgtgtagaatctgcaagtggagatatggaccgctttgaggcctatggtagtaaaggaaatagcttcatataaaagctagacagtagcattctcagaaacttctttgtgatgcttgcattcaactcacagagttgaactttcctttcgagagagaagctttgaaacactctttttccagaatctgcaagtggacatttggagggctttgaggcctgtggtggaaaaggaattatcttcccgtaaaagctagatagaagcattgtcagaaacttctttgtgatgattgcattcaactcacagagttgaaggttccttttcaaagagcagtttccaatcactctttctgtggaatctgcaagtggatatttggacctattttgaagatttcgttggaaacgggagaatcttcacagaaaagctaaacagaagcattctcagaaacttctctgtgatgtttgtgttcaactcccagagtttcacattgcttttcatagagtagttctgaaacatgcttttcgtagtgtctacaagtggacatttggagcgctttcaggcctgtggtggaaaacgaattatggtcacataaaaactggagagaagccttctcagaaacttctctgtgatgattgcattcaactcacagagttgaaccctcctatggatagagcagtgttgaaactctctttttgtggaatctgcatgtggatatgtggacctctccgaagatgtctttggaaacgggaatatcttcacataaaaactaaacagaagcattctcagaaacttcttggtgatgtttgcattcaaatcccagagttgaaccttcctttgatagttcaggtttgaaacactctttttgtaggatctgcaagtggatatttggaccactctgtggccttcgttcgaaacgggtatatcttcgcataaaatctagacagaagcattctcagaaaatactttgtgatgattgagcttaactcacagagctgaacattcctttggatggagcaggtttgagacacactttttgtagaatctacaagtggatatttggacctctctgaggatttcgttggaaacgggataactgcacctaactaaacggaagcattctcagaaactgctttgtgatgattgcattcacctcacagagttgaacattcctattgatagagcagtttggaaacactcttgttgtggaatgtgcaagtggagatttggagcgctttgaggcctatggtagtaaagggaatagcttcatagaaaaactagacagatgcattctcaggaactttttggtgatgtttgtattcaactcccagagttgaactttcctttggaaagagcagctatgaaacactctttttctagaatctgcaagtggacgtttggagggctttgtggtttgtggtggaaaaggaaatatcttcacctaaatactagatagaagcattctcagaagcttctctgtgatgactgcattgaactcacggagttgaacactccttttgagagcgcagttttgaaactctctttctgtggcatctgcaaggggacatgtagacctctttgaagatttcgttggaaacggaatcatcttcacatcaaaactatacagaagcagtcccagaatcttctttgtgatgtttgcattcaaatcccagagttgaactttcctttccaagttcacgtttgaaacactctttttgcaggatctacaagtcgatatttggaccactctgcgtccttcgttcgaaacgggtatatcttcacatgacatctagacagaagctttctcagaaaattctttgggatgattgagttgagcaaacagagctgaacactccttgcgatgtagcagtttagaaacacactttctgcagaatctgcaagtgcatatgtggacctctctgaggaattcgttggaaatgggataatttcagctgactaaacagaagcattctcagaaccttcttcgtgatgtctgcattcaactcacagtgtggaacctttctttgatagttcaggtttgaaacactctttttgtagaaactgcaaggggatcattgcacttctttgaggcctaccgtagtaaaggagataagttcctataaaaagaagacagaagcattctcagaaccctcttcgtgatgtttgcattcaactcacggtgctgaacctttctttgatagttcagctttgaaacactctttttgtagaaactgcaagtggatatttggtcctctctgaggatttcgttggaaacgggataaaccgcacagaactaaacagaagcattctcagaaccttcttcgtgatgtttgcattcaactcacagtgttgaacctttctttgatagttcaggtttgaaacggtctttccgtagaaactgcaggtagatatttggacctctctgaggatttcgttggaaacgggataaaccgcacacaactaaaacagaagcattcacagaaaactcttggtgacgactgagtttaactcacagagctgaacattcctttggatggagcagtttcgaaacacactatttgtagaatgtgcaagtggatatgtgggcctctctgaggatttcgttggaaacgggataaaccgcacagaactaaacagaagcattctcagaaactactttgtgatgattgcattcaagtcacagagttgaacattccctttgacagagcagtttggaaactctctttgtgtagaatctgcaagtggagatatggaacgctttgaggcctatggtagtaaaggaaatagcttcatataaaagctagacagtagcattctcagaaacttctttgtgatgcttgcattcaactcacagagttgaactttcctttcgtgagagaagctttgaaacagtctttttccagaatctgcaagtggatcatttggagggctttgaggcctgtggtggaaaaggaattatcttcccgtaaaagctagatagaagcattgtcagaaacttctttgtgatgattgcattcaactcacagagttgaaggttccttttcaaacagcagtttccaatcactctttctgtggaatctgcaagtggatatttgggcctctctgaggatttcgttggaaacgggataaaacgcacagaactaaaacagaagcattctcagaaacttctctgtgatgtttgtgttcaactcccagagtttcacgttgcttttcatagagtagttctgaaacatgcttttcgtagtgtctgcaagtggacatttggagcgctttcaggcctgtggtggaaaacgaattatggtcacataaaaactggagagaagccttctcagaaacttctctgtgatgattgcattcaactcacagagttgaaccctcctatggatagagcagtgttgaaactctctttttgtggaatctgcaagtggatatgtggacctctccgaagatgtctttggaaacgggaatatcttcacataaaaactaaacagaagcattctcagaaacttcttggtgatgtttgcattcaaatcccagagttgaaccttcctttgatagttcaggtttgaaacactctttctgtaggatctgcaagtggctatttggaccactctgtggccttcgttcgaaacgggtatatcttcgcataaaatctagacagaagcattctcagaaaatactttgtgatgattgagtttaaatcacagagctgaccattcctttggatggagcaggtttgagacacactttttgtagaatctacaagtggatatttggacctctctgaggatttcgttggaaacgggataactgcacctaactaaacggaagcattctcagaaactgctttgtgatgattgcattcacctcacagagttgaacattcctattgatagagcagtttggaaacactcttgttgtggaatgtgcaagtggagatttggagcgctttgaggcctatggtagtaaagggaatagcttcatagaaaaactagacagatgcattctcaggaaccttttggtgatgtttgtattcaactcccagagttgaactttcctttggaaagagcagctatgaaacactctttttctagaatctgcaagtggacgtttggagggctttgtggtttgtggtggaaaaggaaatatcttcacctaaatactagacagaagcattctcagaagcttctctgtgatgactgcattcaactcacggagttgaacactccttttgagagcgcagttttgaaactctctttctgtggcatctgcaaggggacatgtagacctctttgaagatttcgttggaaacggaatcatcttcacataaaaactatacagaagcagtctcagaatcttctttgtgatgtttgcattcaaatcccagagttgaactttcctttcaaagttcacgtttgaaacactctttttgcaggatctacaagtggatatttggaccactctgtgtccttcgttcgaaacgggtatatcttcacacgacatctagacagaagctttctcagaaaattctttgggatgattgagtggaactcacagagctgaacattcattgcgatgtagcagtttagaaacacactttctgcagaatctgcaagtgcatatttggacctctctgaggaattcgttggaaacgggataatttcagctgactaaacagaagcattctcagaaccttcttcgtgatgtctgcattcaactcacagtgtggaacctttctttgatagttcaggtttgaaacactctttttgtagaaactgcaaggggataattgcacttctttgaggcctaccgtagtaaaggaaataacttcctatagaaagaagacagaagcattctcagaaccctcttcgtgatgtttgcattcaactcacagtgctgaacctttctttgatagttcagctttgaaacactcttcttgtagaaactgcaagtggatatttggtcctctctgaggatttcgttggaaacgggataaaccgcacagaactaaacagaagaattctcagagccctcttcgtgatgtttgcattcaactcacagtgctgaacctttctttgatagtgcagctttgaaacactctttttgtagaaactgcaagtggatgtttggtcctctctgaggatttcgttggaaacgggataaaccgcacagaactaaaacagaagcattgtcagaaacttctttgtgatgattgcattcaactcacagagttgaaggttccttttcaaacagcagtttccaatcactctttctgtggaatctgcaagtggatatttgggcctctctgaggatttcgttggaaacgggataaaacgcacagaactaaaacagaagcattctcagaaacttctctgtgatgtttgtgttcaactcccagagtttcaccgttgcttttcatagagtagttctgaaacatgcttttcgtagtgtctgcaagtggacatttggagcgctttcaggcctgtggtggaaaacgaattatggtcacataaaaactggagagaagccttctcagaaacttctctgtgatgattgcattcaactcacagagttgaaccctcctatggatagagcagtgttgaaactctctttttgtggaatctgcaagtggatatgtggacctctccgaagatgtctttggaaacgggaatatcttcacataaaaactaaacagaagcattctcagaaacttcttggtgatgtttgcattcaaatcccagagttgaaccttcctttgatagttcaggtttgaaacactctttctgtaggatctgcaagtggctatttggaccactctgtggccttcgttcgaaacgggtatatcttcgcataaaatctagacagaagcattctcagaaaatactttgtgatgattgagtttaaatcacagagctgaccattcctttggatggagcaggtttgagacacactttttgtagaatctacaagtggatatttggacctctctgaggatttcgttggaaacgggataactgcacctaactaaacggaagcattctcagaaactgctttgtgatgattgcattcacctcacagagttgaacattcgtattgatagagcagtttggaaacactcttcttgtggaatgtgcaagtggagatttggagcgctttggggcctatggtagtaaagggaatagcttcatagaaaaactagacagatgcattctcaggaactttttggtgatgtttgtattcaactcccagagttgaactttcctttggaaagagcagctatgaaacactgtttttctagaatctgcaagtggacgtttggagggctttgtggtttgtggtggaaaaggaaatatcttcacctaaatactagatagaagcattctcagaagcttctctgtgatgactgcattcaactcacggagttgaacactccttttgagagcgcagttttgaaactctctttctgtggcatctgcaaggggacatgtagacctctttgaaaatttcgttggaaacggaatcatcttcacataaaaactacacagaagcagtctcagaatcttctttgtgatgtttgcattcaaatcccagagttgaactttcctttcaaagttcacgtttgaaacactctttttgcaggatctacaagtggatatttggaccactctgtgtccttcgttcgaaacgggtatatcttcacatgacatctagacagaagctttctcagaaaattctttgggatgattgagttgaaatcacagagctgagcattccttgcgatgtagcagtttagaaacacactttctgcagaatctgcaagtgcatatttggacctctctgaggaattcgttggaaacgggataatttcagctgactaaacagaagcattctcagaaccttcttcgtgatgtctgcattcaactcaaagtgtggaacctttctttgatagttcaggttttaaaaactctttttgtagaaactgcaaggggataattgcactctttgaggagtaccgtagtaaaggaaataacttcctataaaaagaagacagaagcattctcagaaccctcttcgtgatgtttgcattcaacacacagtgctgaacctttctttgatagttcagctttgaaacactctttttgtagaaactgcaagtggatatttggtcctctctgacgatttcgttggaaatgggataaaacgcacagaacgaaacagaagcattctcagaaccttcttcgtgatgtttgcattcaactcacagtgttgaacctttctttgatagttcaggtttgaaacggtctttctgtagaaactgcaagtagatatatggacctctctgaggatttcgttggaaacgggataacccgcacagaactaaaacagaagcattcacagaaaactcttggtgacgactgagtttaactcacagagctgaacattcctttggatggagcagtttcgaaacacactatttgtagaatgtgcaagtggatatttgggcctctctgaggatttcgttggaaatgggataaaccgcacagaactaaacagaagcattctcagaaactactttgtgatgattgcattcaagtcacagagttgaacattccctttgacagagcagtttggaaactctctttgtgtagaatctgcaagtggagatatggaccgctttgaggcctatggtagtaaaggaaatagcttcatataaaagctagacagtagcattctcagaaacttctttgtgatgcttgcattcaactcacagagttgaacgttcctttcgagagagaagttttgaaacactctttttccagaatctgcaagtggacatttggagggctttgaggcctgtggtgtaaaaggaattaacttcccgtaaaagctagatagaagcattgtcagaaacttctttgtgatgattgcattcaactcacagagttgaaggttccttttcaaagagcagtttccaatcactctttctgtggaatctgcaagaggatatttcgacctattttgaagatttcgttggaaacgggataatcttcacagaaaagctaaacagaagcattctcagaaacttctctgtgatgtttgtgttcaactcccagagtttcacgttgcttttcatagagtagttctgaaacatgcttttcgtagtgtctgcaagtggacatttggagcgcttcaggcctgtggtggaaaacgaattatggtcacataaaaactggagagaagccttctcagaaacttctctgtgatgattgcattcaactcacagagttgaaccctcctatggatagagcagtgttgaaactctctttttgtggaatctgcaagtggatatgtggacctctccgaagatgtctttggaaacgggaatatcttcacataaaaactaaacagaagcattctcagaaacttcttggtgatgtttgcattcaaatcccagagttgaaccttcctttgatagttcaggtttgaaacactctttctgtaggatctgcaagtggctatttggaccactctgtggccttcgttcgaaacgggtatatcttcgcataaaatctagacagaagcattctcagaaaatactttgtgatgattgagtttaaatcacagagctgaccattcctttggatggagcaggtttgagacacactttttgtagaatctacaagtggatatttggacctctctgaggatttcgttggaaacgggaaaactgcacctaactaaacggaagcattctcagaaactgctttgtgatgattgcattcacctcacagagttgaacattcctattgatagagcagtttggaaacactcttgttgtggaatgtgcaagtggagatttggagcgctttgaggcctgtggtagtaaagggaatagcttcatagaaaaactagacagatgcattctcaggaactttttggtgatgtttgtattcaactcccagagttgaactttcctttggaaagagcagctatgaaacactctttttctagaatctgcaagtggacgtttggagggctttgtggtttgtggtggaaaaggaaatatcttcacctaaatactagatagaagcattctcagaagcttctctgtgatgactgcattcaactcacggagttgaacactccttttgagagcgcagttttgaaactctctttctgtggcatctgcaaggggacatgtagacctctttgaagatttcgttggaaacggaatcatcttcacataaaaactatacagaagcagtctcagaatcttctttgtgatgtttgcattcaaatcccagagttgaactttcctttcaaagttcacgtttgaaacactctttttgcaggatctacaagtggatatttggaccactctgtgtccttcgttcgaaacgggtatatcttcacacgacatctagacagaagctttctcagaaaattctttgggatgattgagtggaactcacagagctgaacattccttgcgatgtagcagtttagaaacacactttctgcagaatctgcaagtgcatatttggacctctctgaggaattcgttggaaacgggataatttcagctgactaaacagaagcattctcagaaccttcttcgtggtgtctgcattcaactcacagtgtggaacctttctttgatagttcaggtttgaaacactctttttgtagaaactgcaaggggataattgcacttctttgaggcctaccgtagtaaaggaaataacttcctatagaaagaagacagaagcattctcagaaccctcttcgtgatgtttgcattcaactcacagtgctgaacctttctttgatagttcagctttgaaacactcttcttgtagaaactgcaagtggatatttggtcctctctgaggatttcgttggaaacgggataaaccgcacagaactaaacagaagaattctcagagccctcttcgtgatgtttgcattcaactcacagtgctgaacctttctttgatagtgcagctttgaaacactctttttgtagaaactgcaagtggatgtttggtcctctctgaggatttcgttggaaacgggataaaccacacagaactaaaacagaagcattgtcagaaacttctttgtgatgattgcattcaactcacagagttgaaggttccttttcaaacagcagtttccaatcactctttctgtggaatctgcaagtggatatttgggcctctctgaggatttcgttggaaacgggataaaacgcacagaactaaaacagaagcattctcagaaacttctctgtgatgtttgtgttcaactcccagagtttcacgttgcttttcatagagtagttctgaaacatgcttttcgtagtgtctgcaagtggacatttggagcgctttcaggcctgtggtggaaaacgaattatggtcacataaaaactggagagaagccttctcagaaacttctctgtgatgattgcattcaactcacagagttgaaccctcctatggatagagcagtgttgaaactctctttttgtggaatctgcaagtggatatgtggacctctccgaagatgtctttggaaacgggaatatcttcacataaaaactaaacagaagcattctcagaaacttcttggtgatgtttgcattcaaatcccagagttgaaccttcctttgatagttcaggtttgaaacactctttttgtaggatctgcaagtggctatttggaccactctgtggccttcgttcgaaacgggtatatcttcgcataaaatctagacagaagcattctcagaaaatactttgtgatgattgagtttaaatcacagagctgaacattcctttggatggagcaggtttgagacacactttttgtagaatctacaagtggatatttggacctctctgaggatttcgttggaaacgggataactgcacctaactaaacggaagcattctcagaaactgctttgtgatgattgcattcacctcacagagttgaacattcctattgatagagcagtttggaaacactcttgttgtggaatgtgcaagtggagatttggagcgctttgaggcctatggtagtaaagggaatagcttcatagaaaaactagacagatgcattctcaggaactttttggtgatgtttgtattcaactcccagagttgaactttcctttggaaagagcagctatgaaacactctttttctagaatctgcaagtggacgtttggagggctttgtggtttgtggtggaaaaggaaatatcttcacctaaatactagatagaagcattctcagaagcttctctgtgatgactgcattcaactcacggagttgaacactccttttgagagcgcagttttgaaactctctttctgtggcatctgcaaggggacatgtagacctctttgaagatttcgttggaaacggaatcatcttcacataaaaactatacagaagcagtctcagaatcttctttgtgatgtttgcattcaaatcccagagttgaactttcctttcaaagttcacgtttgaaacactctttttgcaggatctacaagtggatatttggaccactctgtgtccttcgttcgaaacgggtatatcttcacacgacatctagacagaagctttctcagaaaattctttgggatgattgagtggaactcacagagctgaacattccttgcgatgtagcagtttagaaacacactttctgcagaatctgcaagtgcatatttggacctctctgaggaattcgttggaaacgggataatttcagctgactaaacagaagcattctcagaaccttcttcgtgatgtctgcattcaactcacagtgtggaacctttctttgatagttcaggtttgaaacactctttttgtagaaactgcaaggggataattgcacttctttgaggcctaccgtagtaaaggaaataacttcctatagaaagaagacagaagcattctcagaaccctcttcgtgatgtttgcattcaactcacagtgctgaacctttctttgatagttcagctctgaaacactcttcttgtagaaactgcaagtggatatttggtcctctctgaggatttcgttggaaacgggataaaccgcacagaactaaacagaagcattctcagagccctcttcgtgatgtttgcattcaactcacagtgctgaacctttctttgatagtgcagctttgaaacactctttttgtagaaactgcaagtggatgtttggtcctctctgaggatttcgttggaaacgggataaaccgcacagaactaaaacagaagcattgtcagaaacttctttgtgatgattgcattcaactcacagagttgaaggttccttttcaaacagcagtttccaatcactctttctgtggaatctgcaagtggatatttgggcctctctgaggatttcgttggaaacgggataaaacgcacagaactaaaacagaagcattctcagaaacttctctgtgatgtttgtgttcaactcccagagtttcacgttgcttttcatagagtagttctgaaacatgcttttcgtagtgtctgcaagtggacatttggagcgctttcaggcctgtggtggaaaacgaattatggtcacataaaaactggagagaagccttctcagaaacttctctgtgatgattgcattcaactcacagagttgaaccctcctatggatagagcagtgttgaaactctctttttgtggaatctgcaagtggatatgtggacctctccgaagatgtctttggaaacgggaatatcttcacataaaaactaaacagaagcattctcagaaacttcttggtgatgtttgcattcaaatcccagagttgaaccttcctttgatagttcaggtttgaaacactctttctgtaggatctgcaagtggctatttggaccactctgtggccttcgttcgaaacgggtatatcttcgcataaaatctagacagaagcattctcagaaaatactttgtgatgattgagtttaaatcacagagctgaccattcctttggatggagcaggtttgagacacactttttgtagaatctacaagtggatatttggacctctctgaggatttcgttggaaacgggataactgcacctaactaaacggaagcattctcagaaactgctttgtgatgattgcattcacctcacagagttgaacattcctattgatagagcagtttggaaacactcttgttgtggaatgtgcaagtggagatttggagcactttgaggcctatggtagtaaagggaatagcttcatagaaaaactagacagatgcattctcaggaactttttggtgatgtttgtattcaactcccagagttgaactttcctttggaaagagcagctatgaaacactctttttctagaatctgcaagtggacgtttggagggctttgtggtttgtggtggaaaaggaaatatcttcacctaaatactagatagaagcattctcagaagcttctctgtgatgactgcattcaactcacggagttgaacactccttttgagagcgcagttttgaaactctctttctgtggcatctgcaaggggacatgtagacctctttgaagatttcgttggaaacggaatcatcttcacataaaaactatacagaagcagtctcagaatcttctttgtgatgtttgcattcaaatcccagagttgaactttcctttcaaagttcacgtttgaaacactctttttgcaggatctacaagtggatatttggaccactctgtgtccttcgttcgaaacgggtatatcttcacacgacatctagacagaagctttctcagaaaattctttgggatgattgagtggaactcacagagctgaacattccttgcgatgtagcagtttagaaacacactttctgcagaatctgcaagtgcatatttggacctctctgaggaattcgttggaaacgggataatttcagctgactaaacagaagcattctcagaaccttcttcgtgatgtctgcattcaactcacagtgtggaacctttctttgatagttcaggtttgaaacactctttttgtagaaactgcaaggggataattgcacttctttgaggcctaccgtagtaaaggaaataacttcctatagaaagaagacagaagcattctcagaaccctcttcgtgatgtttgcattcaactcacagtgctgaacctttctttgatagttcagctttgaaacactcttcttgtagaaactgcaagtggatatttggtcctctctgaggatttcgttggaaacgggataaaccgcacagaactaaacagaagaattctcagagccctcttcgtgatgtttgcattcaactcacagtgctgaacctttctttgatagtgcagctttgaaacactctttttgtagaaactgcaagtggatgtttggtcctctctgaggatttcgttggaaacgggataaaccgcacagaactaaaacagaagcattgtcagaaacttctttgtgatgattgcattcaactcacagagttgaaggttccttttcaaacagcagtttccaatcactctttctgtggaatctgcaagtggatatttgggcctctctgaggatttcgttggaaacgggataaaacgcacagaactaaaacagaagcattctcagaaacttctctgtgatgtttgtgttcaactcccagagtttcacgttgcttttcatagagtagttctgaaacatgcttttcgtagtgtctgcaagtggacatttggagcgctttcaggcctgtggtggaaaacgaattatggtcacataaaaactggagagaagccttctcagaaacttctctgtgatgattgcattcaactcacagagttgaaccctcctatggatagagcagtgttgaaactctctttttgtggaatctgcaagtggatatgtggacctctccgaagatgtctttggaaacgggaatatcttcacataaaaactaaacagaagcattctcagaaacttcttggtgatgtttgcattcaaatcccagagttgaaccttcctttgatagttcaggtttgaaacactctttctgtaggatctgcaagtggctatttggaccactctgtggccttcgttcgaaacgggtatatcttcgcataaaatctagacagaagcattctcagaaaatactttgtgatgattgagtttaaatcacagagctgaccattcctttggatggagcaggtttgagacacactttttgtagaatctacaagtggatatttggacctctctgaggatttcgttggaaacgggataactgcacctaactaaacggaagcattctcagaaactgctttgtgatgattgcattcacctcacagagttgaacattcctattgatagagcagtttggaaacactcttgttgtggaatgtgcaagtggagatttggagcgctttgaggcctatggtagtaaagggaatagcttcatagaaaaactagacaggatgcattctcaggaactttttggtgatgtttgtattcaactcccagagttgaactttcctttggaaagagcagctatgaaacactctttttctagaatctgcaagtggacgtttggagggctttgtggtttgtggtggaaaaggaaatatcttcacctaaatactagatagaagcattctcagaagcttctctgtgatgactgcattcaactcacggagttgaacactccttttgagagcgcagttttgaaactctctttctgtggcatctgcaaggggacatgtagacctctttgaagatttcgttggaaacggaatcatcttcacataaaaactatacagaagcagtctcagaatcttctttgtgatgtttgcattcaaatcccagagttgaacttccctttcaaagttcacgtttgaaacactctttttgcaggatctacaagtggatatttggaccactctgtgtccttcgttcgaaacgggtatatcttcacatgacatctagacagaagctttctcagaaaatcctttgggatgattgagtggaactcacagagctgaacattccttgcgatgtagcagtttagaaacacactttctgcagaatctgcaagtgcatatgtggacctctctgaggaattcgttggaaacgggataatttcagctgactaaacagaagcattctcagaaccttcttcgtgatgtctgcattcaactcacagtgtggaacctttctttgatagttcaggtttgaaacactctttttgtagagactgcaaggggataattgcacttctttgaggcctaccgtagtaaaggaaataacttcccataaaaagaagacagaagcattctcagaaccttcttcgtgatgtctgcattcaactcacagtgtggaatctttctttgatagttcaggtttgaaacactctttttgtagaaactgcaagtggatatttggtcctctgtgaggatttcgttggaaacgggataaaccgcacagaactaaacagaagaattctcagagccctcttcgtgatgtttgcattcaactcacagtgctgaacctttctttgatagtgcagctttgaaacactctttttgtagaaactgcaagtggatgtttggtcctctctgaggatttcgttggaaacgggataaaccgcacagaactaaaacagaagcattgtcagaaacttctttgtgatgattgcattcaactcacagagttgaaggttccttttcaaacagcagtttccaatcactctttctgtggaatctgcaagtggatatttgggcctctctgaggatttcgttggaaacgggataaaacgcacagaactaaaacagaagcattctcagaaacttctctgtgatgtttgtgttcaactcccagagtttcacgttgcttttcatagagtagttctgaaacatgcttttcgtagtgtctgcaagtggacatttggagcgctttcaggcctgtggtggaaaacgaattatggtcacataaaaactggagagaagccttctcagaaacttctctgtgatgattgcattcaactcacagagttgaaccctcctatggatagagcagtgttgaaactctctttttgtggaatctgcaagtggatatgtggacctctccgaagatgtctttggaaacgggaatatcttcacataaaaactaaacagaagcattctcagaaacttcttggtgatgtttgcattcaaatcccagagttgaaccttcctttgatagttcaggtttgaaacactctttctgtaggatctgcaagtggctatttggaccactctgtggccttcgttcgaaacgggtatatcttcgcataaaatctagacagaagcattctcagaaaatactttgtgatgattgagtttaaatcacagagctgaccattcctttggatggagcaggtttgagacacactttttgtagaatctacaagtggatatttggacctctctgaggatttcgttggaaacgggataactgcacctaactaaacggaagcattctcagaaactgctttgtgatgattgcattcacctcacagagttgaacattcctattgatagagcagtttggaaacactcttgttgtggaatgtgcaagtggagatttggagcgctttgaggcctgtggtagtaaagggaatagcttcatagaaaaactagacagatgcattctcaggaactttttggtgatgtttgtattcaactcccagagttgaactttcctttggaaagagcagctatgaaacactctttttctagaatctgcaagtggacgtttggagggctttgtggtttgtggtggaaaaggaaatatcttcacctaaatactagatagaagcattctcagaagcttctctgtgatgactgcattcaactcacggagttgaacactccttttgagagcgcagttttgaaactctctttctgtggcatctgcaaggggacatgtagacctctttgaagatttcgttggaaacggaatcatcttcacataaaaactatacagaagcagtctcagaatcttctttgtgatgtttgcattcaaatcccagagttgaactttcctttcaaagttcacgtttgaaacactctttttgcaggatctacaagtggatatttggaccactctgtgtccttcgttcgaaacgggtatatcttcacacgacatctagacagaagctttctcagaaaattctttgggatgattgagtggaactcacagagctgaacattccttgcgatgtagcagtttagaaacacactttctgcagaatctgcaagtgcatatttggacctctctgaggaattcgttggaaacgggataatttcagctgactaaacagaagcattctcagaaccttcttcgtgatgtctgcattcaactcacagtgtggaacctttctttgatagttcaggtttgaaacactctttttgtagaaactgcaaggggataattgcacttctttgaggcctaccgtagtaaaggaaataacttcctatagaaagaagacagaagcattctcagaaccctcttcgtgatgtttgcattcaactcacagtgctgaacctttctttgatagttcagctttgaaacactcttcttgtagaaactgcaagtggatatttggtcctctctgaggatttcgttggaaacgggataaaccgcacagaactaaacagaagcattctctgaaccttcttcgtgatgtttgcattcaactcacagtgttgaacctttctttgatagttcaggttggaaacggtctttctgtagaaactgcaagtagatatttggacctctctgaggatttcgttggaaacgggataaaccgcacagaactaaaacagatagcattcacagaaaactcttggtgacgactgagtttaactcacagagctgaacattcctttggatggagcagtttcgaaacacactatttgtagaatgtgcaagtggatatttgggcctctctgaggatttcgctggaaacgggataaaccgcacagaactaaacagagcattctcagaaactactttgtgatgattgcattcaagtcacagagttgaacattccctttgacagagcagtttggaaactctctttgtgtagaatctgcaagtggagatatggaccgctttgaggcctatggtagtaaaggaaatagcttcatataaaagctagacagtagcattctcagaaacttctttgtgatgcttgcattcaactcacagagttgaactttcctttcgagagagaagctttgaaacactctttttccagaatctgcaagtggacatttggagggctttgaggcctgtggtggaaaaggaattaacttcccgtaaaagctagatagaagcattgtcagaaacttctttgtgatgattgcattcaactcacggagatgaaggttcctttacaaacagcagtttccaaacactctttctgtggaatctgcaagtggatatttggacctctttgaagatttcgttggaaacgggagaatcttcacagaaaagctaaacagaagcattctcagaaacttctctgtgatgtttgtgttcaactcccagagtttcacattgcttttcatagagtagttctgaaacatgcttttcgtagtgtctgcaagtggacatttggagcgctttcaggcctgtggtggaaaacgaattatggtcccataaaaactggagagaagccttctcagaaacttctctgtgatgattgcattcaactcacatagttgaaccctcctatggatagagcagtgttgaaactctctttttgtggaatctgcaagtggatatgtggacctctccgaagatgtctttggaaacgggaatatcttcacataaaaactaaacagaagcattctcaggaaacttcttggtgatgtttgcattcaaatcccagagttgaaccttcctttgatagttcaggtttgaaacactctttttgtaggatctgcaagtggctatttggaccactctgtggccttcgttcgaaacgggtatatcttcgcataaaatctagacagaagcattctcagaaaatactttgtgatgattgagtttaaatcacagagctgaccattcctttggatggagcaggtttgagacacactttttgtagaatctacaagtggatatttggacctctctgaggattcgttggaaacgggataactgcacctaactaaacggaagcattctcagaaactgctttgtgatgattgcattcacctcacagagttgaacattcctattgatagagcagtttggaaacactcttgttgtggaatgtgcaagtggagatttggagcgctttgaggcctatggtagtaaagggaatagcttcatagaaaaactagacagatgcattctcaggaactttttggtgatgtttgtattcaactcccagagttgaactttcctttggaaagagcagctatgaaacactctttttctagaatctgcaagtggacgtttggagggctttgtggtttgtggtggaaaaggaaatatcttcacctaaatactagatagaagcattctcagaagcttctctgtgatgactgcattcaactcacggagttgaacactccttttgagagcgcagttttgaaactccctttctgtggcatctgcaaggggacatgtagacctctttgaagatttcgttggaaacggaatcatcttcacataaaaactatacagaagcagtctcagaatcttctttgtgatgtttgcattcaaatcccagagttgaactttcctttcaaagttcacgtttgaaacactctttttgcaggatctacaagtggatatttggaccactctgtgtccttcgttcgaaacgggtatatcttcacatgacatctagacagaagctttctcagaaaactctttgggatgattgagttgaactcacagagctgaacattccttgcgatgtagcagtttagaaacacactttctgcagaatctgcaagtgcatatttggacctctctgaggaattcgttggaaacgggataatttcagctgactaaacagaagcattctcagaaccttcttcgtgatgtctgcattcaactcacagtgtggaacctttctttgatagttcaggtttgaaacactctttttgtagaaactgcaaggggataattgcacttctttgaggcctaccgtagtaaaggaaataacttcctataaaaagaagacagaagcattctcagaaccctcttcgtgatgtttgcattcaactcacagtgctgagcctttctttgatagttcagctttgaaacactctttttgtagaaactgcaagtggatatttggtcctctctgaggatttcgttggaaaagggataaaccgcacagaactaaacagaagaattctcagagccctcttcgtgatgtttgcattcaactcacagtgctgaacctttctttgatagtgcagctttgaaacactctttttgtagaaactgcaagtggatgtttggtcctctctgaggatttcgttggaaacgggataaaccgcacagaactaaaacagaagctttcacagaaaactcttggtgacgactgagtttaactcacagagctgaacattcctttggatggagcagtttagaaacacactatttgtagaatgtgcaagtggatatgtgggcctctctgaggatttcgttggaaacgggataaaccgcccagaactaaacagaagcattctcagaaactactttgtgatgattgcattcaagtcacagagttgaacattccctttgacagagcagtttggaaactctctttgtgtagaatctgcaagtggagatatggaccgctttgaggcctatggtagtaaaggaaatagcttcatataaaagctagacagtagcattctcagaaacttctttgtgatgcttgcattcaactcacagagttgaactttcctttcgagagagaagctttgaaacactctttttccagaatgtgcaagtggacatttggggagctttgaggcctgtggtggaaaaggaattatcttcccgtaaaagctagatagaagcattgtcagaaacttctttgtgatgattgcattcaactcacagagttgaaggttccttttcaaacagcagtttccaatcactctttctgtggaatctgcaagtggatatttcgacctctttgaagatttcgttggaaacgggagaatcttcccagaaaagctaaacagaagcattctcagaaacttctctgtgatgtttgtgttcaactcccagagtttcacgttgcttttcatagagtagttctgaaacatgcttttcgtagtgtctgcaagtggacatttggagcgctttcaggcctgtggtggaaaacgaattatggtcacataaaaactggagagaagccttctcagaaacttctctgtgatgattgcattcaactcacagagttgaaccctcctatggatagagcagtgttgaaactctcttttgtggaatctgcaagtggatatgtggacctcgccgaagatgtctttggaaacgggaatatcttcacataaaaactaaacagaagcattctcagaaacttcttggtgatgtttgcattcaaatcccagagttgaaccttcctttgatagttcaggtttgaaacactctttttgtaggatctgcaagtggctatttggaccactctgtggccttcgttcgaaacgggtatatcttcgcataaaatctagacagaagcattctcagaaaatactttgtgatgattgagtttaaatcacagagctgaacattcctttggatggagcaggtttgagacacactttttgtagaatctacaagtggatatttggacctctctgaggatttcgttggaaacgggataactgcacctaactaaacggaagcattctcagaaactgctttgtgatgattgcattcacctcacagagttgaacattcctattgatagagcagtttggaaacactcttgttgtggaatgtgcaagtggagatttggagcgctttgaggtctatggtagtaaagggaatagcttcatagaaaaactagacagatgcattctcaggaactttttggtgatgtttgtattcaactcccagagttgaactttcctttggaaagagcagctatgaaacactctttttctagaatctgcaagtggacgtttggagggctttgtggtttgtggtggaaaaggaaatatcttcacctaaatactagatagaagcattctcagaagcttctctgtgatgactgcattcaactcacggagttgaacactccttttgagagcgcagttttgaaactctctttctttggcatctgcaaggggacatgtagacctctttgaagatttcgttggaaacggaatcatcttcacataaaaactatacagaagcagtctcagaatcttctttgtgatgtttgcattcaaatcccagagttgaactttcctttcaaagttcacgtttgaaacactctttttgcaggatctacaagtggatatttggaccaatctgtgtccttcgttcgaaacgggtatatcttcacatgacatctagacagaagctttctcagaaaattgtttgggatgattgagttgaactcacagagctgagcattccttgcgatgtagcagtttagaaacacactttctgcagaatctgcaagtgcatatttggacctctctgaggaattcgttggaaacgggataatttcagctgactaaacagaagcattctcagaaccttcttcgtgatgtctgcattcaactcacagtgtggaacctttctttgatagttcaggtttgaaacactctttttgtagaaactgcaaggggataattgcactctttgaggagtaccgtagtaaaggaaataacttcctgtaaaaagaagacagaagcattctcagaatcctcttcgtgatgtttgcattcaactcacagtgctgaacctttctttgatagttcagctttgaaacactcttcttgtagaaactgcaagtggatatttcgtcctctctgaggatttcgttggaaacgggataaaccgcacagaactaaacagaagcattctcagaaccttcttcgtgatgtttgcattcaactcacagtgttgaacctttctttgatagttcaggtttgaaacggtctttctgtagaaactgcaagtagatatttggacctctctgaggatttcgttggaaacgggataacccgcacagaactaaaacagaagcattcacagaaaactcttggtgacgactgagtttaactcacagagctgaacattcctttggatggatcagtttcgaaacacactatttgtagaatgtgcaagtggatatttgggcctctctgaggatttcgttggaaacgggataaaccgcacagaactaaacagaagcattctcagaaactactttgtgatgattgcattcaagtcacagagttgaacattccctttgacagagcagtttggaaactctctttgtgtagaatctgcaagtggagatatggaccgctttgaggcctatggtagtaaaggaaatagcttcatataaaagctagacagtagcattctcagaaacttctttgtgatgcttgcattcaactcacagagttgaactttcctttcgagagagaagctttgaaacactctttttccagaatctgcaagtggacatttggagggctttgaggcctgtggtggaaaaggaattatcttcccgtaaaagctagatagaagcattgtcagaaacttctttgtgatgattgcattcaagtcacagagttgaaggttccttttcaaagagcagtttccaatcactctttctgtggaatctgcaagtggatatttggacctctttgaagatttcgttggaaacgggagaatcttcacagaaaagctaaacagaagcattctcagaaacttctctgtgatgtttgtgttcaattcccagagtttcacattgcttctcatagagtagttctgaaagatgcttttcgtagtgtctgcaagtggacatttggagcgctttcaggcctgtggtggaaaacgaattatggtcacataaaaactggagagaagccttctcagaaacttctctgtgatgattgcattcaactcacagagttgaaccctcctatggatagagcagtgttgaaactctctttttgtggaatctgcaagcggatacgtggacctctcagaagatgtctttggaaacgggaatatcttcacataaaaactaaacagaagcattctcagaaacttcttggtgatgtttgcattcaaatcccagagttgaaccttcctttgatagttcaggtttgaaacactctttttgtaggatctgcaagtggatatttggaccactctgtggccttcgttcgaaaagggtacgtcttcgcataaaatctagacagaagcattctcagaaaatactttgtgatgattgagttgaactcacagagctgaacattcctttggatggagcaggtttgagacacactttttgtagaatctacaagtggatatttggacctctctgaggatttcgttggaaacgggataactgcacctaactaaacggaagcattctcagaaactgctttgtgatgattgcattcacctcacagagttgaacattcctattgatagagcagtttggaaacactcttgttgtggaatgtgcaagtggagatttggagcgctttgaggcctatggtagtaaagggaatagcttcatagaaaaactagacagatgcattctcaggaacttttttgtgatgtttgtattcaactcccagagttgaactttcctttggaaagagcagctatgaaacactctttttctagaatctgcaagtggacgtttggagggctttgtggtttgtggtggaaaaggaaatatcttcacctaaatactagatagaagcattctcagaagcttctctgtgatgactgcattcaactcacggagttgaacactccttttgagagcgcagttttgaaactctctttctgtggcatctgcaaggggacatgtagacctctttgaagatttcgttggaaacggaatcatcttcacatcaaaactatacagaagcagtctcagaatcttctttgtggtgtttgcattcaaatcccagagttgaactttcctttcaaagttcacgtttgaaacactctttttgcaggatctacaagtggatatttggaccactctgtgtccttcgttcgaaacgggtatatcttcacatgacatctagacagaagctttctcagaaaattctttgggatgattgagtggaactcacagagctgaacattccttgcgatgtagcagtttagaaacacactttctgcagaatctgcaagtgcatatttggacctctctgaggaattcgttggaaacgggataatttcagctgactaaacagaagcattctcagaaccttcttcgtgatgtctgcattcaactcacagtgtggaacctttctttgatagttcaggtttgaaacactctttttgtagaaactgcaaggggataattgcacttctttgaggcctaccgtagtaaaggaaataacttcctatagaaagaagacagaagcattctcagaaccctcttcgtgatgtttgcattcaactcacagtgctgaacctttctttgatagttcagctttgaaacactcttcttgtagaaactgcaagtggatatttcgtcctctctgaggatttcgttggaaacgggataaaccgcacagaactaaacagaagaattctcagagccctcttcgtgatgtttgcattcaactcacagtgctgaacctttctttgatagtgcagctttgaaacactctttttgtagaaactgcaagtggatatttggtcctctctgaggatttcgttggaaacgggataaaccgcacagaactaaaacagaagcattgtcagaaacttctttgtgatgattgcattcaactcacagagttgaaggttccttttcaaacagcagtttccaatcactctttctgtggaatctgcaagtggatatttgggcctctctgaggatttcgttggaaacgggataaaacgcacagaactaaaacagaagcattctcagaaacttctctgtgatgtttgtgttcaactcccagagtttcacgttgcttttcatagagtagttctgaaacatgcttttcgtagtgtctgcaagtggacatttggagcgctttcaggcctgtggtggaaaacgaattatggtcacataaaaactggagagaagccttctcagaaacttctctgtgatgattgcattcaactcacagagttgaaccctcctatggatagagcagtgttgaaactctctttttgtggaatctgcaagtggatatgtggacctctccgaagatgtctttggaaacgggaatatcttcacataaaaactaaacagaagcattctcagaaaacttcttggtgatgtttgcattcaaatcccagagttgaaccttcctttgatagttcaggtttgaaacactctttctgtaggatctgcaagtggctatttggaccactctgtggccttcgttcgaaacgggtatatcttcgcataaaatctagacagaagcattctcagaaaatactttgtgatgattgagtttaaatcacagagctgaccattcctttggatggagcaggtttgagacacactttttgtagaatctacaagtggatatttggacctctctgaggatttcgttggaaacgggataactgcacctaactaaacggaagcattctcagaaactgctttgtgatgattgcattcacctcacagagttgaacattcctattgatagagcagtttggaaacactcttgttgcggaatgtgcaagtggagatttggagcgctttgaggcctgtggtagtaaagggaatagcttcatagaaaaactagacagatgcattctcaggaactttttggtgatgtttgtattcaactcccagagttgaactttcctttggaaagagcagctatgaaacactctttttctagaatctgcaagtggacgtttggagggctttgtggtttgtggtggaaaaggaaatatcttcacctaaatactagatagaagcattctcagaagcttctctgtgatgactgcattcaactcacggagttgaacactccttttgagagcgcagttttgaaactctctttctgtggcatctgcaaggggacatgtagacctctttgaagatttcgttggaaacggaatcatcttcacatcaaaagtatacagaagcagtctcagaatcttctttgtggtgtttgcattcaaatcccagagttgaactttcctttcaaagttcacgtttgaaacactctttttgcaggatctacaagtggatatttggaccactctgtgtccttcgttcgaaacgggtatatcttcacatgacatctagacagataagctttctcagaaaattctttgggatgattgagttgaactcacagagctgagcattccttgcgatgtagcagtttagaaacacactttctgcagaatctgcaagtgcatatttggacctctgtgaggaattcgttggaaacgggataatttcagctgactaaacagaagcatcctcagaaccttcttcgtgatgtctgcattcaactcacagtgtggaacctttctttgatagttcaggtttgaaacactctttttgtagaaactgcaaggggataattgcacttctttgaggccaaccgtagtaaaggaaataaattcctataaaaagaagacaagaagcattctcagaaccttcttcgtgatgtttgcattcaactcacagtgctgaaactttctttgatagttcagctttgaaacactctttttgtagaaactgcaagtggatatttggtcctctgtgaggatttcgttggaaacgggataaaccgcacagaactaaacagaagcattcacagaaaactcttggtgacgactgagtttaactcacagagctgaacacccctttggatggagcagtttcgaaacacactatttgtagaatgtgcaagtggatattggggcctctctgaggatttcgttggaaacgggataaaccgcacagaactaaacagaagcattctcagaaactactttgtgatgattgcattcaagtcacagagttgaacattccctttgacagagcagtttggaaactctctttgtgtagaatctgcaagtggagatatggaccgctttgaggactatggtagtaaaggaaatagcttcatataaaagctagacagtagcattctcagaaacttctttgtgatgcttgcattcaactcacagagttgaactttcctttcgagagagaagctttgaaacactctttttccagaatctgcaagtggacatttggagggctttgaggcctgtggtggaaaaggaattatcttcccgtaaaagctagatagaagcattgtcagaaacttctttgtgattattgcattcaactcacagagttgaaggttccttttgaaacagcagtttccaaacactctttctgtggaatctacaagtagatatttggacctctttgaagatttcgttggaaacgggagaatcttcacagaaaagctaaacagaagctttctcagaaacttctctgtgatgtttgtgttcaactcccagagtttcacattgcttttcatagagtagttctgaaacatgcttttcgtagtgtctgcaagtggacatttggagcgctttcaggcctgtggtggaaaacgaattatggtcacatagaaactggagagaagccttctcagaaacttctctgtgatgattgcattcaactcacagagttgaaccctcctatggatagagcagtgttgaaactctctttttgtggaatctgtaagtggatatgtggacctctccgaagatgtctttggaaacgggaatatcttcacataaaaactaaacagaagcattctcagaaacttcttggtgatgtttgcattcaaatcccagagttggaacttcctttgatagttcaggtttgaaacactctttttgtaggatctgcaagtggatatttggaccactctgtggccttcgttcgaaacgggtacatcttcgcaaaaaatctagacagaagcattctcagaaaatactttgtgatgattgagtttaactcacagagctgaacattcctttggatggagcaggtttgagacacactttttgtagaatctacaagtggatatttcgacctctctgaggatttcgttggaaacgggataactgcacctaactaaacggaagcattctcagaaactgctttgtgatgattgcattcacctcacagagttgaacattcctattgatagagcagtttggaaacactcttgttgtggaatgtgcaagtggagatttggagcgctttgaggcctatggtagtaaagggaatagcttcatagaaaaactagacagatgcattctcaggaaccttttggtgatgtttgtattcaactcccagagttgaactttcctttggaaagagcagctatgaaacactctttttctagaatctgcaagtggacgtttggagggctttgtggtttgtggtggaaaaggaaatatcttcacctaaatactagatagaagcattctcagaagcttctctgtgatgactgcattcaactcacggagttgaacactccttttgagagcgcagttttgaaactctctttctgtggcatctgcaaggggacatgtagacctctttgaagatttcgttggaaacggaatcatcttcacataaaaactatacagaagcagtctcagaatcttctttgtgatgtttgcattcaaatcccagagttgaactttcctttcaaagttcacgtttgaaacactctttttgcaggatctacaagtggatatttggaccactctgtgtccttcgttcgaaacgggtatatcttcacacgacatctagacagaagctttctcagaaaattctttgggatgattgagtggaactcacagagctgaacattccttgcgatgtagcagtttagaaacacactttctgcagaatctgcaagtgcatatttggacctctctgaggaattcgttggaaacgggataatttcagctgactaaacagaagcattctcagaaccttcttcgtgatgtctgcattcaactcacagtgtggaacctttctttgatagttcaggtttgaaacactctttttgtagaaactgcaaggggataattgcacttctttgaggcctaccgtagtaaaggaaataacttcctatagaaagaagacagaagcattctcagaaccctcttcgtgatgtttgcattcaactcacagtgctgaacctttctttgatagttcagctttgaaacactcttcttgtagaaactgcaagtggatatttggtcctctctgaggatttcgttggaaacgggataaaccgcacagaactaaacagaagaattctcagagccctcttcgtgatgtttgcattcaactcacagtgctgaacctttctttgatagtgcagctttgaaacactctttttgtagaaactgcaagtggatatttggtcctctctgaggatttcgttggaaacgggataaaccgcacagaactaaaacagaagcattcacagaaaactcttggtgacgactgagtttaactcacagagctgaacattcctttggatggagcagtttcgaaacacactatttgtagaatctgcaagtggatatttgggcctctctgaggatttcgttggaaacgggataaaacgcacagaactaaaacagaaacattctcagaaactactttgtgatgattgcattcaagtcacagagttgaacattccctttgacagagcagtttggaaactctctttgtgtagaatctgcaagtggagatatggaccgctttgaggcctatggtagtaaaggaaataccttcatataaaagctagacagtagcattctcagaaacttctttgtgatgcttgcattcaactcacagagttgaactttcctttcgagagagaagctttgaaacactctttttccagaatctgcaagtggacatttggagggctttgaggcctgtggtggaaaaggaattatcttcccgtaaaagctagatagaagcattgtcagaaacttctttgtgatgattgcattcaagtcacagagttgaaggttccttttcaaagagcagtttccaatcactctttctgtggaatctgcaagtggatatttggacctctttgaagatttcgttggaaacgggagaatcttcacagaaaagctaatcagaagcattctcagaaacttctctgtgatgtttgtgttcaactcccagagtttcacattgcttttcatagagtagttctgaaacatgcttttcgtagtgtctacaagtggacatttggagcgctttcaggcctgtggtggaaaacgaattatggtcacataaaaactggagagaagccttctcagaaacttctctgtgatgattgcattcaactcacagagttgaaccctcctatggatagagcagtgttgaaactctctttttgtggaatctgcaagtggatatgtggacctctccgaagatgtctttggaaacgggaatatcttcacataaaaactaaacagaagcattctcagaaacttcttggtgatgtttgcattcaaatcccagagttgaaccttcctttgatagttcaggtttgaaacactctttttgtaggatctgcaagtggatatttggaccactctgtggccttcgttcgaaacgggtatatcttcgcataaaatctagacagaaagcattctcagaaaatactttgtgatgattgagtttaactcacagagctgaacattcctttggatggagcaggtttgagacacaccttttgtacaatctacaagtggatatttggacctctctgaggatttcgttggaaacgggataactgcacctaactaaacggaagcattctcagaaactgctttgtgatgattgcattcacctcacagagttgaacattcctattgatagagcagtttggaaacactcttgttgcggaatgtgcaagtggagatttggagcgctttgaggcctgtggtagtaaagggaatagcttcatagaaaaactagacagatgcattctcaggaactttttggtgatgtttgtattcaactcccagagttgaactttcctttggaaagagcagctatgaaacactctttttctagaatctgcaagtggacgtttggagggctttgtggtttgtggtggaaaaggaaatatcttcacctaaatactagatagaagcattctcagaagcttctctgtgatgactgcattcaactcacggagttgaacactccttttgagagcgcagttttgaaactctctttctgtggcatctgcaaggggacatgtagacctctttgaagatttcgttggaaacggaatcatcttcacataaaaactatacagaagcagtctcagaatcttctttgtgatgtttgcattcaaatcccagagttgaactttcctttcaaagttcacgtttgaaacactctttttgcaggatctacaagtggatatttggaccactctgtgtccttcgttcgaaacgggtatatcttcacacgacatctagacagaagctttctcagaaaattctttgggatgattgagtggaactcacagagctgaacattccttgcgatggagcagtttagaaacacactttctgcagaatctgcaagtgcatatttggacctctctgaggaattcgttggaaacgggataatttcagctgactaaacagaagcattctcagaaccttcttcgtgatgtctgcattcaactcacagtgtggaacctttctttgatagttcaggtttgaaacactctttttgtagaaactgcaaggggataattgcacttctttgaggcctaccgtagtaaaggaaataacttcctatagaaagaagacagaagcattctcagaaccctcttcgtgatgtttgcattcaactcacagtgctgaacctttctttgatagttcagctttgaaacactcttcttgtagaaactgcaagtggatatttggtcctctctgaggatttcgttggaaacgggataaaccgcacagaactaaacagaagaattctcagagccctcttcgtgatgtttgcattcaactcacagtgctgaacctttctttgatagtgcagctttgaaacactctttttgtagaaactgcaagtggatgtttggtcctctctgaggatttcgttggaaacgggataaaccgcacagaactaaaacagaagcattgtcagaaacttctttgtgatgattgcattcaactcacagagttgaaggttccttttcaaacagcagtttccaatcactctttctgtggaatctgcaagtggatatttgggcctctctgaggatttcgttggaaacgggataaaacgcacagaactaaaacagaagcattctcagaaacttctctgtgatgtttgtgttcaactcccagagtttcacgttgcttttcatagagtagttctgaaacatgcttttcgtagtgtctgcaagtggacatttggagcgctttcaggcctgtggtggaaaacgaattatggtcacataaaaactggagagaagccttctcagaaacttctctgtgatgattgcattcaactcacagagttgaaccctcctatggatagagcagtgttgaaactctctttttgtggaatctgcaagtggatatgtggacctctccgaagatgtctttggaaacgggaatatcttcacataaaaactaaacagaagcattctcagaaacttcttggtgatgtttgcattcaaatcccagagttgaaccttcctttgatagttcaggtttgaaacactctttttgtaggatctgcaagtggatatttggaccactctgtggccttcgttcgaaacgggtatatcttcgcataaaatctagacagaagcattctcagaaaatactttgtgatgattgagtttaactcacagagctgaacattcctttggatggagcaggtttgagacacaccttttgtagaatctacaagtggatatttggacctctctgaggatttcgttggaaacgggataactgcacctaactaaacggaagcattctcagaaactgctttgtgatgattgcattcacctcacagagttgaacattcctattgatagagcagtttggaaacactcttgttgtggaatgtgcaagtggagatttggagcgctttgaggcctatggtagtaaagggaatagcttcatagaaaaactagacagatgcattctcaggaactttttggtgatgtttgtattcaactcccagagttgaactttcctttggaaagagcagctatgaaacactctttttctagaatctgcaagtggacgtttggagggctttatggtttgtggtggaaaaggaaatatcttcacctaaatactagatagaagcatcctcagaagcttctctgtgatgactgcattcaactcacggagttgaacactccttttgagaacgcagttttgaaactctctttctgtggcatctgcaaggggacatgtagacctctttgaagatttcgttggaaacggaatcatcttcacataaaaactatacagaagcagtctcagaatcttctttgtgatgtttgcattcaaatccccgagttgaactttcctttcaaagttcacgtttgaaacactctttttgcaggatctacaagtggatatttggaccactctgtgtccttcgttcgaaacgggtatatcttcacatgacatctagacagaagctttctcagaaaattctttgggatgattgagttgaactcacagagctgagcattccttgcgatgtagcagtttagaaacacactttctgcagaatctgcaagtgcatatttggacctctgtgaggaattcgttggaaacgggataatttcagctgactaaacagaagcattctcagaaccttcttcgtgatgtctgcattcaactcacagtgtggaacctttctttgatagttcaggtttgaaacactctttttgtataaactgcaaggggataattgcactctttgaggagtaccgtagtaaaggaaataacttcctctaaaaagaagacagaagcattctcagaaccctcttcgtgatgtttgcattcaactcacagtgctgaacctttcttgatagttcagctttgaaacactcttcttgtagaaactgcaagtggatatttggtcctctctgaggatttcgttggaaacgggataaaccgcacagaactaaacagaagcattctcagaaccttcttcgtgatgtttgcattcaactcacagtgttgaacctttctttgatagttcaggtttgaaacggtctttctgtagaaactgcaagtagatatttggacctctctgaggatttcgttggaaacgggataacccgcacagaactaaaacagaagcattcacagaaaactcttggtgacgactgagtttaactcacagagctgaacattcctttggatggagcagtttcgaaacacactatttgtagaatgtgcaagtggatatttaggcctctctgaggatttcgttggaaacgggataaaccgcacagaactaaacagaagcattctcagaaactactttgtgatgattgcattcaagtcacagagttgaacattccctttgacagagcagtttggaaactctctttgtgtaggatctgcaagtggagatatggaccgctttgaggcctatggtagtaaaggaaatagcttcatataaaagctagacagtagcattctcagaaacttctttgtgatgcttgcattcaactcacagagttgaactttcctttcgagagagaagctttgaaacactctttttccagaatctgcaagtggacatttggagggctttgaagcctgtggtggaaaaggaattaacttcccgtaaaagctagatagaagcattgtcagaaacttctttgtgatgattgcattcaactcacagagttgaaggttccttttcaaacagcagtttccaatcactctttctgtggaatctgcaagtggatatttgggcctctctgaggatttcgttggaaacgggataaaacgcacagaactaaaacagaagcattctcagaaacttctctgtgatgtttgtgttcaactcccagagtttcacgttgcttttcatagagtagttctgaaacatgcttttcgtagtgtctgcaagtggacatttggagcgctttcaggcctgtggtggaaaacgaattatggtcacataaaaactggagagaagccttctcagaaacttctctgtgatgattgcattcaactcacagagttgaaccctcctatggatagagcagtgttgaaactctctttttgtggaatctgcaagtggatatgtggacctctccgaagatgtctttggaaacgggaatatcttcacataaaaactaaacagaagcattctcagaaacttcttggtgatgtttgcattcaaatcccagagttgaaccttcctttgatagttcaggtttgaaacactctttctgtaggatctgcaagtggctatttggaccactctgtggccttcgttcgaaacgggtatatcttcgcataaaatctagacagaagcattctcagaaaatactttgtgatgattgagtttaaatcacagagctgaccattcctttggatggagcaggtttgagacacactttttgtagaatctacaagtggatatttggacctctctgaggatttcgttggaaacgggataactgcacctaactaaacggaagcattctcagaaactgctttgtgatgattgcattcacctcacagagttgaacattcctattgatagagcagtttggaaacactcttgttgtggaatgtgcaagtggagatttggagcgctttgaggcctatggtagtaaagggaatagcttcatagaaaaactagacagatgcattctcaggaactttttggtgatgtttgtattcaactcccagagttgaactttcctttggaaagagcagctatgaaacactctttttctagaatctgcaagtggacgtttggagggctttgtggtttgtggtggaaaaggaaatatcttcacctaaatactagatagaagcattctcagaagcttctctgtgatgactgcattcaactcacggagttgaacactccttttgagagcgcagttttgaaactccctttctgtggcatctgcaagtggacatgtagacctctttgaagatttcgttggaaacggaatcatcttcacataaaaactatacagaagcagtctcagaatcttctttgtgatgtttgcattcaaatcccagagttgaactttcctttcaaagttcacgtttgaaacactctttttgcaggatctacaagtggatatttggaccactctgtgtccttcgttcgaaacgggtatatcttcacaggacatctagacagaagctttctcagaaaattctttgggatgattgagtggaactcacagagctgaacattccttgcgatgtagcagtttagaaacacactttctgcagaatctgcaagtgcatatttggacctctctgaggaattcgttggaaacgggataatttcagctgactaaacagaaagcattctcagaaccttcttcgtgatgtctgcattcaactcacagtgtggaacctttctttgatagttcaggtttgaaacactctttttgtagaaactgcaaggggataattgcacttctttgaggcctaccgtagtaaaggaaataacttcctatagaaagaagacagaagcattctcagaaccctcttcgtgatgtttgcattcaactcacagtgctgaacctttctttgatagttcagctttgaaacactcttcttgtagaaactgcaagtggatatttggtcctactactgaggatttcgttggaaacgggataaaccgcacagaactaaacagaagaattctcagagccctcttcgtgatgtttgcattcaactcacagtgctgaacctttctttgatagtgcagctttgaaacactctttttgtagaaactgcaagtggatgtttggtcctctctgaggatttcgttggaaacgggataaaccgcacagaactaaaacagaagcattgtcagaaacttctttgtgatgattgcattcaactcacagagttgaaggttccttttcaaacagcagtttccaatcactctttctgtggaatctgcaagtggatatttgggcctctctgaggatttcgttggaaacgggataaaacgcacagaactaaaacagaagcattctcagaaacttctctgtgatgtttgtgttcaactcccagagtttcacgttgcttttcatagagtagttctgaaacatgcttttcgtagtgtctgcaagtggacatttggagcgctttcaggcctgtggtggaaaacgaattatggtcacataaaaactggagagaagccttctcagaaacttctctgtgatgattgcattcaactcacagagttgaaccctcctatggatagagcagtgttgaaactctctttttgtggaatctgcaagtggatatgtggacctctccgaagatgtctttggaaacgggaatatcttcacataaaaactaaacagaagcattctcagaaacttcttggtgatgtttgcattcaaatcccagagttgaaccttcctttgatagttcaggtttgaaacactctttctgtaggatctgcaagtggctatttggaccactctgtggccttcgttcgaaacgggtatatcttcgcataaaatctagacagaagcattctcagaaaatactttgtgatgattgagtttaaatcacagagctgaccattcctttggatggagcaggtttgagacacactttttgtagaatctacaagtggatatttggacctctctgaggatttcgttggaaacgggataactgcacctaactaaacggaagcattctcagaaactgctttgtgatggttgcattcacctcacagagttgaacattcctattgatagagcagtttggaaacactcttgttgtggaatgtgcaagtggagatttggagcgctttgaggcctatggtagtaaagggaatagcttcatagaaaaactagacagatgcattctcaggaaccttttggtgatgtttgtattcaactcccagagttgaactttcctttggaaagagcagctatgaaacactctttttctagaatctgcaagtggacgtttggagggctttgtggtttgtggtggaaaaggaaatatcttcacctaaatactagatagaagcattctcagaagcttctctgtgatgactgcattcaactcacggagttgaacactccttttgagagcgcagttttgaaactctctttctgtggcatctgcaaggggacatgtagacctctttgaagatttcgttggaaacggaatcatcttcacataaaaactatacagaagcagtctcagaatcttctttgtgatgtttgcattcaaatccctgagttgaactttcctttccaagttcacgtttgaaacactctttttgcaggatctacaagtggatatttggacctctctgtgtccttcgttcgaaacgggtatatcttcacatgacatctagacagaagctttctcagaaaattctttgggatgattgagtggaactcacagagctgaacattccttgcgatgtagcagtttagaaacacactttctgcagaatctgcaagtgcatatttggacctctctgaggaattcgttggaaacgggataatttcagctgactaaacagaagcattctcagaaccttcttcgtgatgtctgcattcaactcacagtgtggaacctttctttgatagttcaggtttgaaacactctttttgtagaaactgcaaggggataattgcacttctttgaggcctaccgtagtaaaggaaataacttcctatagaaagaagacagaagcattctcagaaccctcttcgtgatgtttgcattcaactcacagtgctgaacctttctttgatagttcagctttgaaacactcttcttgtagaaactgcaagtggatatttggtcctctctgaggatttcgttggaaacgggataaaccgcacagaactaaacagaagcattctcagaaccttcttcgtgatgtttgcattcaactcacagtgttgaacctttctttgatagttcaggtttgaaacggtctttctgtagaaactgcaagtagatatttggacctctctgaggatttcgttggaaacgggatgaaccgcacagaactaaaacagaagcattcacagaaaactcttggtgacgactgagtttaactcacagagctgaacattcctttggatggagcagtttcaaaacacactatttgtagaatgtgcaagtggatatgtgggcctctctgaggatttcgttggaaacgggataaaccgcacagaactaaacagaagcattctcagaaactactttgtgatgattgcattcaagtcacagagttgaacataccctttgacagagcagtttggaaactctctttgcgtagaatctgcaagtgaagatatggaccgctttgaggcctatggtagtaaaggaaatagcttcatataaaagctagacagcagcattctcagaaacttctttgtgatgcttgcattcaactcacagagttgaactttcctttcgagagagaagctttgaaacactctttttccagaatctgcaagtggacatttggagggctttgaggcctgtggtggaaaaggaattatcttcccttaaaagctagatagaagcattgtcagaaacttctttgtgatgattgcattcaagtcacagagttgaaggttccttttcaaagagcagtttccaatcactctttctgtggaatctgcaagtggatatttggacctctttgaagatttcgttggaaacgggagaatcttcacagaaaagctaaacagaagcattctcagaaacttctctgtgatgtttgtgttcaactcccagagtttcacattgcttctcatagagtagttctgaaacatgcttttcgtagtgtctgcaagtggacatttggagcgctttcaggcctgtggtggaaaacgaattatggtcacataaaaactggagagaagccttctcagaaacttctctgtgatgattgcattcaactcacagtgttgaaccctcctatggatagagcagtgttgaaactctctttttgtggaatctgcaagcggatatgtggacctctccgaagatgtctttggaagcgggaatatcttcacataaaaactaaacagaagcattctcagaaacttcttggtgatgtttgcattcaaatcccagagttgaaccttcctttgagagttcaggtttgaaacactctttttgtaggatctgcaagtggatatttggaccactctgtggccttcgttcgaaacggttacatcttcgcataaaatctagacagaagcattctcagaaaatactttgtgatgattgagttgaactcacagagctgaacattcctttggatggagcaggtttgagacacactttttgtagaacctacaagtggatatttggacctctctgaggatttcgttggaaacgggataactgcacctaactaaacggaagaattctcagaaactgctttgtgatgattgcattcacctcacagagttgaacattcctattgatagagcagtttggaaacactcttcttgtggaatgtgcaagtggtgatttggagtgctttgaggcctatggtagtaaagggaatagcttcatagaaaaactagacagatgcattctcaggaactttttggtgatgtttgtattcaactcccagagttgaactttcctttggaaagagcagctatgaaacactctttttctagaatctgcaagtggacgtttggagggctttgtggtttgtggtggaaaaggaaatatcttcacctaaatactagatagaagcattctcagaagcttctctgtgatgactgcattcaactcacggagttgaacactccttttgagagcgcagttttgaaactctctttctgtggcatctgcaaggggacatgtagacctctttgaagatttcgttggaaacggaatcatcttcacataaaaactatacagaagcagtctcagaatcttctttgtgatgtttgcattcaaatcccagagttgaactttcctttcaaagttcacgtttgaaacactctttttgcaggatctacaagtggatatttggaccactctgtgtccttcgttcgaaacgggtatatcttcacacgacatctagacagaagctttctcagaaaattctttgggatgattgagtggaactcacagagctgaacattccttgcgatgtagcagtttagaaacacactttctgcagaatctgcaagtgcatatttggacctctctgaggaattcgttggaaacgggataatttcagctgactaaacagaagcattctcagaacttcttcgtgatgtctgcattcaactcacagtgtggaacctttctttgatagttcaggtttgaaacactctttttgtagaaactgcaaggggataattgcacttctttgaggcctaccgtagtaaaggaaataacttcctatagaaagaagacagaagaattctcagagccctcttcgtgatgtttgcattcaactcacagtgctgaacctttctttgatagtgcagctttgaaacactctttttgtagaaactgcaagtggatgtttggtcctctgctgaggatttcgttggaaacgggataaaccgcacagaactaaaacagaagcattctcagaaccttcttcgtgatgtttgcattcaactcacagtgttgaacctttctttgatagttcaggtttgaaacggtctttctgtagaaactgcaagtagatatttggacctctctgaggatttcgttggaaacgggataacccgcacagaactaaaacagaagcattcacagaaaactcttggtgacgactgagtttaactcacagagctgaactttcctttggatggagcagtttcgaaacacactatttgtagaatgtgcaagtggatatttgggcctctctgaggatttcgttggaaacgggataaaccgcacagaactaaacagaagctttttcagaaactactttgtgatgattgcattcaagtcacagagttgaacattccctttgacagagcagtttggaaactctctttgtgtagaatctgcaagtggagatatggaccgctttgaggcctatggtagtaaaggaaatagcttcatataaaagctagacagtagcattctcagaaacttctttgtgatgcttgcattcaactcacagagttgaactttcctttcgagagagaagctttgaaacactctttttccagaatctgcaagtggacatttggagggctttgaggcctgtggtggaaaaggaattaacttcccgtaaaagctagatagaagcattgtcagaaacttctttgtgatgattgcattcaactcacagagatgaaggttcctttacaaacagcagtttccaaacactctttctgtggaatctgcaagtggatatttggacctctttgaagatttcgttggaaacgggagaatcttcacagaaaagctaaacagaagcattctcagaaacttctctgtgatgtttgtgttcaactcccagagtttcacattgcttttcatagagtagttctgaaacatgcttttcgtagtgtctgcaagtggacatttggagtgctttcaggcctgtggtggaaaacgaattatggtcccataaaaactggagagaagccttctcagaaacttctctgtgatgattgcattcaactcacagatttgaaccctcctatggatagagcattgttgaaactctctttttgtggaatctgcaagtggatatgtggacctctccgaagatgtctttggaaacgggcatatcttcacataaaaactaaacagaagcattctcagaaacttcttggtgatgtttgcattcaaatcccagagttgaaccttcctgtgatagttcaggtttgaaacactctttttgtaggatctgcaagtggatatttggaccactctgtggccttcgttcgaaacgggtacatcttcacataaaatctagacagaagcattctcagaaaatactttgtgatgattgagtttaactcacagagctgaacattcctttggatggagcaggtttgagacacactttttgtagaatctacaagtggatatttggacctctctgaggatttcgttggaaacgcgataactgcacctaactaaacggaagcattctcagaaactgctttgtgatgattgcattcacctcacagagttgaacattcctattgatagagcagtttggaaacactcttgttgtggaatgtgcaagtggagatttggagcgctttgaggcctatggtagtaaagggaatagcttcatagaaaaactagacagatgcattctcaggaactttttggtgatgtttgtattcaactcccagagttgaactttcctttggaaagagcagctatgaagcactctttttctagaatctgcaagtggacgtttggagggctttgtggtttgtggtggaaaaggaaatatcttcacctaaatactagagagaagcattctcagaagcttctctgtgatgactgcattcaactcacggggttgaacactccttttgggagcgcagttttgaaactctctttctgtggcatctgcaaggggacatgtagacctctttgaagatttcgttggaaacggaatcatcttcacatcaaaactatacagaagcagtctcagaatcttctttgtgatgtttgcattcaaatcccagagttgaactttcctttcaaagttcacgtttgaaacactctttttgcaggatctacaagtggatatttggaccactctgtgtccttcgttcgaaacgggtatatcttcacatgacatctagacagaagctttctcagaaaattctttgggatgattgagtggaactcacagagctgaacattccttgcgatgtagcagtttagaaacacactttctgcagaatctgcaagtgcatatttggacctctctgaggaattcgttggaaacgggataatttcagctgactaaacagaagcattctcagaaccttcttcgtgatgtctgcattcaactcacagtgtggaacctttctttgatagttcaggtttgaaacactctttttgtagaaactgcaaggggataattgcacttctttgaggcctaccgtagtaaaggaaataacttcctatagaaagaagacagaagcattctcagaaccctcttcgtgatgtttgcattcaactcacagtgctgaacctttctttgatagttcagctttgaaacactcttcttgtagaaactgcaagtggatatttggtcctctctgaggatttcgttggaaacgggataaaccgcacagaactaaacagaagaattctcagagccctcttcgtgatgtttgcattcaactcacagtgctgaacctttctttgatagtgcagctttgaaacactctttttgtagaaactgcaagtggatgtttggtcctctctgaggatttcgttggaaacgggataaaccgcacagaactaaaacagaagcattgtcagaacttctttgtgatgattgcattcaactcacagagttgaaggttccttttcaaacagcagtttccaatcactctttctgtggaatctgcaagtggatatttgggcctctctgaggatttcgttggaaacgggataaaacgcacagaactaaaacagaagcattctcagaaacttctctgtgatgtttgtgttcaactcccagagtttcacgttgcttttcatagagtagttctgaaacatgcttttcgtagtgtctgcaagtggacatttggagcgctttcaggcctgtggtggaaaacgaattatggtcacataaaaactggagagaagccttctcagaaacttctctgtgatgattgcattcaactcacaggagttgaaccctcctatggatagagcagtgttgaaactctctttttgtggaatctgcaagtggatatgtggacctctccgaagatgtctttggaaacgggaatatcttcacataaaaactaaacagaagcattctcagaaacttcttggtgatgtttgcattcaaatcccagagttgaaccttcctttgatagttcaggtttgaaacactctttctgtaggatctgcaagtggctatttggaccactactgtggccttcgttcgaaacgggtatatcttcgcataaaatctagacagaagcattctcagaaaatactttgtgatgattgagttgaactcacagagctgaacattcctttggatggagcaggtttgagacacactttttgtagaatctacaagtggatatttggacctctctgaggatttcgttggaaacgggataactgcacctaactaaacggaagcattctcagaaactgctttgtgatgattgcattcacctcacagagttgaacattcctattgatagagcagtttggaaacactcttgttgtggaatgtgcaagtggagatttggagcgctttgaggcctatggtagtaaagggaatagcttcatagaaaaactagacagatgcattctcaggaactttttggtgatgtttgtattcaactcccagagttgaactttcctttggaaagagcagctatgaaacactctttttctagaatctgcaagtggacgtttggagggctttgtggtttgtggtggaaaaggaaatatcttcacctaaatactagatagaagcatcctcagaagcttctctgtgatgactgcattcaactcacggagttgaacactccttttgagagcgcagttttgaaactctctttctgtggcatctgcaaggggacatgtagacctctttgaagatttcgttggaaacggaatcatcttcacataaaaactatacagaagcagtctcagaatcttctttgtgatgtttgcattcaaatccccgagttgaactttcctttcaaagttcacgtttgaaacactctttttgcaggatctacaagtggatatttggaccactctgtgtccttcgatcgaaacgggtatatcttcacatgacatctagacagaagctttctcagaaaattctttgggatgattgagttgaactcacagagctgagcattccttgcgatgtagcagtttagaaacacactttctgcagaatctgcaagtgcatatttggacctctgtgaggaattcgttggaaacgggataatttcagctgactaaacagaagcattctcagaaccttcttcgtgatgtctgcattcaactcacagtgtggaacctttctttgatagttcaggtttgaaacactctttttgtagaaactgcaaggggataattgcactctttgaggagtaccgtagtaaaggaaataacttcctataaaaagaagacagaagcattctcagaaccctcttggtgatgtttgaattcaactcacagtgctgaacctttctttgatagttcagctttgaaacactctttttgtagaaagtgcaagtggatatttggtcctctctgaggatttcgttggaaacgggataaactgcacagaactaaacagaagcattctcagaaccttcttcgtgatgtttgcattcaactcacagtgttgaacctttctttgatagttcaggtttgaaacggtctttctgtagaaactgcaagtagatatttggacctctctgaggatttcgttggaaacgggataacccgcacagaactaaaacagaagcattcacagaaaactcttggtgacgactgagtttaactcacagagctgaacattcctttggatggagcagtttcgaaacacactatttgtagaatgtgcaagtggatatttaggcctctctgaggatttcgttggaaacgggataaaccgcacagaactaaacagaagcattctcagaaactactttgtgatgattgcattcaagtcacagagttgaacattccctttgacagagcagtttggaaactctctttgtgtagaatctgcaagtggagatatggaccgctttgaggcctatggtagtaaaggaaatagcttcatataaaagctagacagtagcattctcagaaacttctttgtgatgcttgcattcaactcacagagttgaactttcctttcgagagagaagctttgaaacactctttttccagaatctgcaagtggacatttggagggctttgaggcctgtggtggaaaaggaattatcttcccgtaaaagctagatagaagcattgtcagaaacttctttgggatgattgcattcaactcacagagttgaaggttccttttcaaagagcagtttccaatcactctttctgtggaatctgcaagtggatatttggacctattttgaagatttcgttggaaacgggagaatcttcacaggaaagctaaacagaagcattctcagaaacttctctgtgatgtttgtgttcaactcccagagtttcacattgcttttcatagagtagttctgaaacatgcttttcgtagtgtctacaagtggacatttggagcgctttcaggcctgtggtggaaaacgaattatggtcacataaaaactggagagaagccttctcagaaacttctctgtgatgattgcattcaactcacagagttgaaccctcctatggatagagcagtgttgaaactctctttttgtggaatctgcaagtggatatgtggacctctccgaagatgtctttggaaacgggaatatcttcacataaaaactaaacagaagcattctcagaaacttcttggtgatgtttgcattcaaatcccagagtcgaaccttcctttgatagttcaggtttgaaacactctttttgtaggatctgcaagtggatatttggaccactctgtggccttcgttcgaaacgggtatatcttcgcataaaatctagacagaagcattctcagaaaatactttgtgatgattgagtttaactcacagagctgaacattcctttggatggagcaggtttgagacacactttttgtagaatctacaagtggatatttggacctctctgaggatttcgttggaaacgggataactgcacctaactaaacggaagcattctcagaaactgctttgtgatgattgcattcacctcacagagttgaacattcctattgatagagcagtttggaaacactcttgttgtggaatgtgcaagtggagatttggagcgctttgaggcctatggtagtaaagggaatagcttcatagaaaaactagacagatgcattctcaggaactttttggtgatgtttgtattcaactcccagagttgaactttcctttggaaagagcagctatgaaacactctttttctagaatctgcaagtggacgtttggagggctttgtggtttgtggtggaaaaggaaatatcttcacctaaatactagatagaagcattctcagacgcttctctgtgatgactgcattcaactcacggagttgaacactccttttgagagcgcagttttgaaactctctttctgtggcatctgcaaggggacatgtagacctctttgaagatttcgttggaaacggaatcatcttcacataaaaactatatagaagcagtctcagaatcttctttgtgatgtttgcattcaaatcccagagttgaactttcctttcaaagttcacgtttgaaacactctttttgcaggatctacaagtggatatttggaccactctgtgtccttcgttcgaaacgggtatatcttcacacgacatctagacagaagctttctcagaaaattctttgggatgattgagtggaactcacagagctgaacattccttgcgatgtagcagtttagaaacacactttctgcagaatctgcaagtgcatatttggacctctctgaggaattcgttggaaacgggataatttcagctgactaaacagaagcattctcagaaccttcttcgtgatgtctgcattcaactcacagtgtggaacctttctttgatagttcaggtttgaaacactctttttgtagaaactgcaaggggataattgcacttctttgaggcctaccgtagtaaaggaaataacttcctatagaaagaagacagaagcattctcagaaccctcttcgtgatgtttgcattcaactcacagtgctgaacctttctttgatagttcagctttgaaacactcttcttgtagaaactgcaagtggatatttggtcctctctgaggatttcgttggaaacgggataaaccgcacagaactaaacagaagaattctcagagccctcttcgtgatgtttgcattcaactcacagtgctgaacctttctttgatagtgcagctttgaaacactctttttgtagaaactgcaagtggatgtttggtcctctctgaggatttcgttggaaacgggataaaccgcacagaactaaaacagaagcattgtcagaaacttctttgtgatgattgcattcaactcacagagttgaaggttccttttcaaacagcagtttccaatcactctttctgtggaatctgcaagtggatatttgggcctctctgaggatttcgttggaaacgggataaaacgcacagaactaaaacagaagcattctcagaaacttctctgtgatgtttgtgttcaactcccagagtttcacgttgcttttcatagagtagttctgaaacatgcttttcgtagtgtctgcaagtggacatttggagcgctttcaggcctgtggtggaaaacgaattatggtcacataaaaactggagagaagccttctcagaaacttctctgtgatgattgcattcaactcacagagttgaaccctcctatggatagagcagtgttgaaactctctttttgtggaatctgcaagtggatatgtggacctctccgaagatgtctttggaaacgggaatatcttcacataaaaactaaacagaagcattctcagaaacttcttggtgatgtttgcattcaaatcccagagttgaaccttcctttgatagttcaggtttgaaacactctttctgtaggatctgcaagtggctatttggaccactctgtggccttcgttcgaaacgggtatatcttcgcataaaatctagacagaagcattctcagaaaatactttgtgatgattgagtttaaatcacagagctgaccattcctttggatggagcaggtttgagacacactttttgtagaatctacaagtggatatttggacctctctgaggatttcgttggaaacgggataactgcacctaactaaacggaagcattctcagaaactgctttgtgatgattgcattcacctcacagagttgaacattcctattgatagagcagtttggaaacactcttgttgtggaatgtgcaagtggagatttggagcgctttgaggcctgtggtagtaaagggaatagcttcatagaaaaactagacagatgcattctcaggaactttttggtgatgtttgtattcaactcccagagttgaactttcctttggaaagagcagctatgaaacactctttttctagaatctgcaagtggacgtttggagggctttgtggtttgtggtggaaaaggaaatatcttcacctaaatactagatagaagcattctcagacgcttctctgtgatgactgcattcaactcacggagttgaacactccttttgagagcgcagttttgaaactctctttctgtggcatctgcaaggggacatgtagacctctttgaagatttcgttggaaacggaatcatcttcacataaaaactatacagaagcagtctcagaatcttctttgtgatgtttgcattcaaatcccagagttgaactttcctttcaaagttcacgtttgaaacactctttttgcaggatctacaagtggatatttggaccactctgtgtccttcgttcgaaacgggtatatcttcacacgacatctagacagaagctttctcagaaaattctttgggatgattgagtggaactcacagagctgaacattccttgcaatgtagcagtttagaaacacactttctgcagaatctgcaagtgcatatttggacctctctgaggaattcgttggaaacgggataatttcagctgactaaacagaagcattctcagaaccttcttcgtgatgtctgcattcaactcacagtgtggaacctttctttgatagctcaggtttgaaacactctttttgtagaaactgcaaggggataattgcacttctttgaggcctaccgtagtaaaggaaataacttcctatagaaagaagacagaagcattctcagaaccctcttcgtgatgtttgcattcaactcacagtgctgaaactttctttgatagttcagctttgaaacactcttcttgtagaaactgcaagtggatatttggtcctctctgaggatttcgttggaaaagggataaaccgcacagaactaaacagaagcattctcagaaccttcttcgtgatgtttgcattcaactcacagtgttgaacctttctttgatagttcaggtttgaaacggtctttctgtagaaactgcaagtagatatttggacctctctgaggatttcgttggaaacgggataacccgcacagaactaaaacagaagcattcacagaaaactcttggtgacgactgagtttaactcacagagctgaacattcctttggatggagtagtttcgaaacacactatttgtagaatgtgcaagtggatatttaggcctctctgaggatttcgttggaaacgggataaaccgcacagaactaaacagaagcattctcagaaactactttgtgatgattgcattcaagtcacagagttgaacattccctttgacagagcagtttggaaactctctttgtgtagaatctgcaagtggagatatggaccgctttgaggcctatggtagtaaaggaaatagcttcatataaaagctagacagtagcattctcagaaacttctttgtgatgcttgcattcaactcacagagttgaactttcctttcgagagagaagctttgaaacacactttttccagaatctgcaagtggacatttggagggctttgaggcctgtggtggaaaaggaattaacttcccgtaaaagctagatagaagcattgtcagaaacttctttgtgatgattgcattcaactcacggagatgaaggttcctttacaaacagcagtttccaaacactctttctgtggaatctgcaagtggatatttggacctctttgaagatttcgttggaaacgggagaatcttcacagaaaagctaaacagaagcattctcagaaacttctctgtgatgtttgtgttcaactcccagagtttcacattgcttttcatagagtagttctgaaacatgcttttcgtagtgtctgcaagtggacatttggagcgctttcaggcctgtggtggaaaacgaattatggtcccataaaaactggagagaagccttctcagaaacttctctgtgatgattgcattcaactcacagagttgaaccctcctatggatagagcattgttgaaactctctttttgtggaatctgcaagtggatatgtggacctctccgaagatgtctttggaaacgggaatatcttcacataaaaactaaacagaagcattctcagaaacttcttggtgatgtttgcattcaaatcccagagttgaaccttcctttgatagttcaggtttgaaacacactttttgtaggatctgcaagtggatatttggaccactctgtggccttcgttcgaaacgggtacatcttcgcataaaatctagacagaagcattctcagaaaatactttgtgatgattgagtttaactcacagagctgaacattcctttggatggagcaggtttgagacacactttttgtagaatctacaagtggatatttggacctctctgaggatttcgttggaaacgcgataactgcacctaattaaacggaagcattctcagaaactgctttgtgatgattgcattcacctcacagagttgaacattcctattgatagagcagtttggaaacactcttgttgtggaatgtgcaagtggagacttggagcgttttgaggcctatggtagtaaagggaatagcttcatagaaaaactagacagatgcattctcaggaactttttggtgatgtttgtattcaactcccagagttgaactttcctttggaaagagcagctatgaaacactctttttctagaatctgcaagtggacgtttggagggctttgtggtttgtggtggaaaaggaaatatcttcacctaaatactagatagaagcattctcagaagcttctctgtgatgactgcattcaactcacggagttgaacactccttttgagagcgcagttttgaaactctctttctgtggcatctgcaaggggacatgtagacctctttgaagatttcgttggaaacggaatcatcttcacataaaaactatacagaagcagtctcagaatcttctttgtgatgtttgcattcaaatcccagagttgaactttcctttcaaagttcacgtttgaaacactctttttgcaggatctacaagtggatatttggaccactctgtgtccttcgttcgaaacgggtatatcttcacacgacatctagacagaagctttctcagaaaattctttgggatgattgagtggaactcacagagctgaacattccttgcgatgtagcagtttagaaacacactttctgcagaatctgcaagtgcatatttggacctctctgaggaattcgttggaaacgggataatttcagctgactaaacagaagcattctcagaaccttcttcgtgatgtctgcattcaactcacagtgtggaacctttctttgatagttcaggtttgaaacactctttttgtagaaactgcaaggggataattgcacttctttgaggcctaccgtagtaaaggaaataacttcctatagaaagaagacagaagcattctcagaaccctcttcgtgatgtttgcattcaactcacagtgctgaacctttctttgatagttcagctttgaaacactcttcttgtagaaactgcaagtggatatttggtcctctctgaggatttcgttggaaacgggataaaccgcacagaactaaacagaagaattctcagagccctcttcgtgatgtttgcattcaactcacagtgctgaacctttctttgatagtgcagctttgaaacactctttttgtagaaactgcaagtggatgtttggtcctctctgaggatttcgttggaaacgggataaaccgcacagaactaaaacagaagcattgtcagaaacttctttgtgatgattgcattcaactcacagagttgaaggttccttttcaaacagcagtttccaatcactctttctgtggaatctgcaagtggatatttgggcctctctgaggatttcgttggaaacgggataaaacgcacagaactaaaacagaagcattctcagaaacttctctgtgatgtttgtgttcaactcccagagtttcacgttgcttttcatagagtagttctgaaacatgcttttcgtagtgtctgcaagtggacatttggagcgctttcaggcctgtggtggaaaacgaattatggtcacataaaaactggagagaagccttctcagaaacttctctgtgatgattgcattcaactcacagagttgaaccctcctatggatagagcagtgttgaaactctctttttgtggaatctgcaagtggatatgtggacctctccgaagatgtctttggaaacgggaatatcttcacataaaaactaaacagaagcattctcagaaacttcttggtgatgtttgcattcaaatcccagagttgaaccttcctttgatagttcaggtttgaaacactctttctgtaggatctgcaagtggctatttggaccactctgtggccttcgttcgaaacgggtatatcttcgcataaaatctagacagaagcattctcagaaaatactttgtgatgattgagtttaaatcacagagctgaccattcctttggatggagcaggtttgagacacactttttgtagaatctacaagtggatatttggacctctctgaggatttcgttggaaacgggataactgcacctaactaaacggaagcattctcagaaactgctttgtgatgattgcattcacctcacagagttgaacattcctattgatagagcagtttggaaacactcttgttgtggaatgtgcaagtggagatttggagcgctttgaggcctgtggtagtaaagggaatagcttcatagaaaaactagacagatgcattctcaggaactttttggtgatgtttgtattcaactcccagagttgaacttccctttggaaagagcagctatgaaacactctttttctagaatctgcaagtggacgtttggagggctttgtggtttgtggtggaaaaggaaatatcttcacctaaatactagagagaagctttctcagaagcttctctgtgatgactgcattcaactcacggagttgaacactccttttgagagcgcagttttgaaactccctttctgtggcatctgcaaggggacatgtagacctctttgaagatttcgttggaaacggaatcatcttcacataaaaactatacagaagtagtctcagaatcttctttgtgatgtttgcattcaaatcccagagttgaactttcttttcaaagttcacgtttgaaacactctttttgcaggatctacaagtggatatttggaccactctgtgtccttcgttcgaaacgggtatatcttcacacgacatctagacagaagctttctcagaaaattctttgggatgattgagtggaactcacagagctgaacattccttgagatgtagcagtttagaaacacactttctgcagaatctgcaagtgcatatgtggacctctctgaggaattcgttggaaacgggataatttcagctgactaaacagaagcattctcagaaccttcttcgtgatgtctgcattcaactcacagtgtggaacctttctttgatagttcaggtttgaaacactctttttgtagaaactgcaaggggataattgcacttctttgaggcctaccgtagtaaaggaaataacttcctatagaaagaagacagaagcattctcagaaccctcttcgtgatgtttgcattcaactcacagtgctgaacctttctttgatagttcagctttgaaacactcttcttgtagaaactgcaagtggatatttggtcctctctgaggatttcgttggaaacgggataaaccgcacagaactaaacagaagaattctcagagccctcttcgtgatgcttgcattcaactcacagtgctgaacctttctttgatagtgcagctttgaaacactctttttgtagaaactgcaagtggatatttggtcctctctgaggatttcgttggaaacgggataaaccgcacagaactaaaacagagagcattgtcagaaacttctttgtgatgattgcattcaactcacagagttgaaggttccttttcaaacagcagtttccaatcactctttctgtggaatctgcaagtggatatttgggcctctctgaggatttcgttggaaacgggataaaacgcacagaactaaaacagagcattctcagaaacttctctgtgatgtttgtgttcaactcccagagtttcacgttgcttttcatagagtagttctgaaacatgcttttcgtagtgtctgcaagtggacatttggagcgctttcaggcctgtggtggaaaacgaattatggtcacataaaaactggagagaagccttctcagaaacttctctgtgatgattgcattcaactcacagagttgaaccctcctatggatagagcagtgttgaaactctctttttgtggaatctgcaagtggatatgtggacctctccgaagatgtctttggaaacgggaatatcttcacataaaaactaaacagaagcattctcagaaacttcttggtgatgtttgcattcaaatcccagagttgaaccttcctttgatagttcaggtttgaaacactctttctgtaggatctgcaagtggctatttggaccactctgtggccttcgttcgaaacgggtatatcttcgcataaaatctagacagaagcattctcagaaaatactttgtgatgattgagtttaaatcacagagctgaccattcctttggatggagcaggtttgagacacactttttgtagaatctacaagtggatatttggacctctctgaggatttcgttggaaacgggataactgcacctaactaaacggaagcattctcagaaactgctttgtgatgattgcattcacctcacagagttgaacattcctattgatagagcagtttggaaacactcttgttgtggaatgtgcaagtggagatttggagcgctttgaggcctatggtagtaaagggaatagcttcatagaaaaactagacagaagcattctcagaaacttctctgtgatgtttgtgttcaactcccagagtttcacgttgcttttcatagagtagttctgaaacatgcttttcgtagtgtctgcaagtggacatttggagggctttgtggtttgtggtggaaaaggaaatatcttcacctaaatactagatagaagccttctcagaaacttctctgtgatgattgcattcaactcacagagttgaaccctcctatggatagagcagtgttgaaactctctttttgtggaatctgcaagtggatatgtggacctctccgaagatgtctttggaaacgggaatatcttcacataaaaactaaacagaagcattctcagaaacttcttggtgatgtttgcattcaaatcccagagttgaaccttcctttgatagttcaggtttgaaacactctttttgtaggatctgcaagtggctatttggaccactctgtggccttcgttcgaaacgggtatatcttcgcataaaatctagacagaagcattctcagaaaatactttgtgatgattgagttaaaatcacagagctgaacattcctttggatggagcaggtttgagacacactttttgtagaatctacaagtggatatttggacctctctgaggatttcgttggaaacgggataactgcacctaactaaacggaagcattctcagaaactgctttgtgatgattgcattcacctcacagagttgaacattcctattgatagagcagtttggaaacactcttgttgtggaatgtgcaagtggagatttggagcgctttgaggcctatggtagtaaagggaatagcttcatagaaaaactagacagatgcattctcaggaactttttggtgatgtttgtattcaactcccagagttgaactttcctttggaaagagcagctatgaaacactctttttctagaatctgcaagtggacgtttggagggctttgtggtttgtggtggaaaaggaaatatcttcacctaaatactagatagaagcattctcagaagcttctctgtgatgactgcattcaactcacggagttgaacactccttttgagagcgcagttttgaaactctctttctgtggcatctgcaagggtacatgtagacctctttgaagatttcgttggaaacggaatcatcttcacataaaaactatacagaaagcagtctcagaatcttctttgtgatgtttgcattcaaatcccagagttgaactttcctttcaaagttcacgtttgaaacactctttttgcaggatctacaagtggatatttggaccactctgtgtccttcgttcgaaacgggtatatcttcacacgacatctagacagagctttctcagaaaattttttgggatgattgagttgaactcacagagctgagcattccttgcgatgtagcagtttagaaacacactttctgcagaatctgcaagtgcatatttggacctctgtgaggaattcgttggaaacgggataatttcagctgactaaacagaagcattctcagaaccttcttcgtgatgtctgcattcaactcacagtgtggaacctttctttgatagttcaggtttgaaacactctttttgtagaaactgcaaggggataattgcacttctttgaggcctacccgtagtaaaggaaataacttcctatagaaagaagacagaagcattctcagaaccctcttcgtgatgtttgcattcaactcacagtgctgaacctttctttgatagttcagctttgaaacactcttcttgtagaaactgcaagtggatatttggtcctctctgaggatttcgttggaaacgggataaaccgcacagaactaaacagaagaattctcagagccctcttcgtgatgtttgcattcaactcacagtgctgaacctttctttgatagtgcagctttgaaacactctttttgtagaaactgcaagtggatgtttggtcctctctgaggatttcgttggaaacgggataaaccgcacagaactaaaacagaagcattgtcagaaacttctttgtgatgattgcattcaactcacagtagttgaaggttccttttcaaacagcagtttccaatcactctttctgtggaatctgcaagtggatatttgggcctctctgaggatttcgttggaaacgggataaaacgcacagaactaaaacagaagcattctcagaaacttctctgtgatgtttgtgttcaactcccagagtttcacgttgcttttcatagagtagttctgaaacatgcttttcgtagtgtctgcaagtggacatttggagcgctttcaggcctgtggtggaaaacgaattatggtcacataaaaactggagagaagccttctcagaaacttctctgtgatgattgcattcaactcacagagttgaaccctcctatggatagagcagtgttgaaactctctttttgtggaatctgcaagtggatatgtggacctctccgaagatgtctttggaaacgggaatatcttcacataaaaactaaacagaagcattctcagaaacttcttggtgatgtttgcattcaaatcccagagttgaaccttcctttgatagttcaggtttgaaacactctttctgtaggatctgcaagtggctatttggaccactctgtggccttcgttcgaaacgggtatatcttcgcataaaatctagacagaagcattctcagaaaatactttgtgatgattgagtttaaatcacagagctgaacattcctttggatggagcaggtttgagacacactttttgtagaatctacaagtggatatttggacctctctgaggatttcgttggaaacgggataactgcacctaactaaacggaagcattctcagaaactgctttgtgatgattgcattcacctcacagagttgaacattcctattgatagagcagtttggaaacactcttgttgtggaatgtgcaagtggagatttggagcgctttgaggcctgtggtagtaaagggaatagcttcatagaaaaactagacagatgcattctcaggaactttttggtgatgtttgtattcaactcccagagttgaactttcctttggaaagagcagctatgaaacactctttttctagaatctgcaagtggacgtttggagggctttgtggtttgtggtggaaaaggaaatatcttcacctaaatactagatagaagctttctcagaagcttctctgtgatgactgcattcaactcacggagttgaacactccttttgagagcgcagttttgaaactccctttctgtggcatctgcaaggggacatgtagacctctttgaagatttcgttggaaacggaatcatcttcacataaaaactatacagaagtagtctcagaatcttctttgtgatgtttgcattcaaatcccagagttgaactttcctttcaaagttcacgtttgaaacactctttttgcaggatctacaagtggatatttggaccactctgtgtccttcgttcgaaacgggtatatcttcacacgacatctaggcagaagctttctcagaaaattctttgggatgattgagttgaactcacagagctgaacattccttgcgatgtagcagtttagaaacacactttctgcagaatctgcaagtgcatatttggacctctctgaggaattcgttggaaacgggataatttcagctgactaaacagaagcattctcagaaccttcttcgtgatgtctgcattcaactcacagtgtggaacctttctttgatagttcaggtttgaaacactctttttgtagaaactgcaaggggataattgcactgctttgaggcctaccgtagtaaaggaaataacttcctataaaaagaagacagaagaattctcagagccctcttcgtgatgtttgcattcaactcacagtgctgaacctttctttgatagtgcagctttgaaacactctttttgtagaaactgcaagtggatgtttggtcctctctgaggatttcgttggaaacgggataaaccgcacagaactaaaacagaagcattgtcagaaacttctttgtgatgattgcattcaactcacagagttgaaggttccttttcaaacagcagtttccaatcactctttctgtggaatctgcaagtggatatttgggcctctctgaggatttcgttggaaacgggataaaacgcacagaactaaaacagaagcattctcagaaacttctctgtgatgtttgtgttcaactcccagagtttcacgttgcttttcatagagtagttctgaaacatgcttttcgtagtgtctgcaagtggacatttggagcgctttcaggcctgtggtggaaaacgaattatggtcacataaaaactggagagaagccttctcagaaacttctctgtgatgattgcattcaactcacagagttgaaccctcctatggatagagcagtgttgaaactctctttttgtggaatctgcaagtggatatgtggacctctccgaagatgtctttggaaacgggaatatcttcacataaaaactaaacagaagcattctcagaaacttcttggtgatgtttgcattcaaatcccagagttgaaccttcctttgatagttcaggtttgaaacactctttctgtaggatctgcaagtggctatttggaccactctgtggccttcgttcgaaacgggtatatcttcgcataaaatctagacagaagcattctcagaaaatactttgtgatgattgagtttaaatcacagagctgaccattcctttggatggagcaggtttgagacacactttttgtagaatctacaagtggatatttggacctctctgaggatttcgttggaaacgggataactgcacctaactaaacggaagcattctcagaaactgctttgtgatgattgcattcacctcacagagttgaacattcctattgatagagcagtttggaaacactcttgttgtggaatgtgcaagtggagatttggagcgctttgaggcctgtggtagtaaagggaatagcttcatagaaaaactagacagatgcattctcaggaactttttggtgatgtttgtattcaactcccagagttgaactttcctttggaaagagcagctatgaaacactctttttctagaatctgcaagtggacgtttggagggctttgtggtttgtggtgcaaaaggaaatatcttcacctaaatactagatagaagcattctcagaagcttctctgtgatgactgcattcaactcacggagttgaacactccttttgagagcgcagttttgaaactctctttctgtggcatctgcaaggggacatgtggacctctttgaagatttcgttggaaacggaatcatcttcacataaaaactatacagaagcagtctcagaatcttctttgcgatgtttgcattcaaatcccagagttgaactttcctttcaaagttcacgtttgaaacactctttttgcaggatctacaagtggatatttggaccactctgtgtccttcgttcgaaacgggtatatcttcacacgacatctagacagaagctttctcagaaaattctttgggatgattgagttgaactcacagagctgaacattccttgcgatgtagcagtttagaaacacactttctgcagaatctgcaagtgcatattgagacctctctgaggaattcgttggaaacgggataatttcagctgactaaacagaagcattctcagaaccttcttcgtgatgtctgcattcaactcacagtgtggaacctttctttgatagttcaggtttgaaacactctttttgtagaaactgcaagggtataattgcacttctttgaggcctaccgtagtaaaggaaataacttcctataaaaagaagacagaagcattctcagaaccctcttcgtgatgtttgcattcaactcacagtgctgaacctttctttgatagttcagctttgaaacactctttttgtagaaactgcaagtggatatttggtccactctgaggatttcgttggaaacgggataaaccgcacagaactaaacagaagcattcacagaaaactcttggtgacgactgagtttaagtcacagagctgaacattcctttggatggagcagtttcgaaacacactatttgtagaatctgcaagtggatatgggggcctctctgaggatttcgttggaaacagggtaaaccgcacagaactaaaacagaagcattctcagaaactactttgtgatgattgcattcaagtcacagagatgaacattccctttgacagagcagtttggaaactctctttgtgtagaatctgcaagtggagatatggaatgctttgaggactatggtagtaaaggaaatagcttcatataaaagctagacagtagcattctcagaaacttctttgtgatgcttgcattcaactcacagagttgaactttcctttcgagagagaagctttgaaacactctttttccagaatctgcaagtggacatttggagggctttgaggcctgtggtggaaaaggaattatcttcccgtaaaagctagatagaaacattgtcagaaacttctttgtgatgattgcattcaactcacagagttgaaggttccttttcaaacagcagtttccaaacactctttctgtggaatctacaactggatatttggacctctttgaagatttcgttggaaacgggagaatcttcacagaaaagctaaacggaagcattctcagaaacttctctgtgatgtttgtgttcaactcccagagtttcatattgcttctcatagagtagttctgaaacatgcttttcgtagtgtctgcaagtggacatttggagcgctttcaggcctgtggtggaaaacgaattatggtcacataaaaactggagagaagccttctcagaaacttctctgtgatgattgcattcaactcacagagttgaaccctcctatggatagagcagtgttgaaactctctttttgtggaatctgcaagtggatatgtggacctctccgaagatgtctttggaaacgggaatatcttcacataaaaactaaacagaagcattctcagaaacttcttggtgatgtttgcattcaaatcccagagttgaaccttcctttgatagttcaggtttgaaacactctttttgtaggatctgcaagtggatatttggaccactctgtggccttcgttcgaaacgggtacatcttcgcataaaatctagacagaagcattctcagaaaatactttgtgatgattgagttgaactcatagagctgaacattcctttggatggagcaggtttgagacacactttttgtagaatctacaagtggatatttggacctctctgaggatttcgttggaaacgggataactgcacctaactaaacggaagcattctcagaaactgctttgtgatgattgcattcacctcacagagttgaccattcctattgatagagcagtttggaaacactcttgttgtggaatgtgcaagtggagatttggagcgctttgaggcctatggtagtaaagggaatagcttcatagaaaaactagacagatgcattctcaggaactttttggtgatgtttgtattcaactcccagagttgaactttcctttggaaagagcagctatgaaacaccctttttctagaatctgcaagtggacgtttggagggctttgtggtttgtggtggaaaaggaaatatcttcacctaaatactagatagaagcattctcagaagcttctctgtgatgactgcattcaactcacggagttgaacactccttttgagagcgcagttttgaaactctctttctgtggcatctgcaaggggacatgtagacctctttgaagatttcgttggaaacggaatcatcttcacataaaaactatacagaagcagtctcagaatcttctttgtgatgtttgcattcaaatcccagagttgaactttcctttcaaagttcacgtttgaaacactctttttgcaggatctacaagtggatatttggaccactctgtgtccttcgttcgaaacgggtatatcttcacacgacatctagacagaagctttctcagaaaattctttgggatgattgagtggaactcacagagctgaacattccttgcgatgtagcagtttagaaacacactttctgcagaatctgcaagtgcatatttggacctctctgaggaattcgttggaaacgggataatttcagctgactaaacagaagcattctcagaaccttcttcgtgatgtctgcattcaactcacagtgtggaacctttctttgatagttcaggtttgaaacactctttttgtagaaactgcaaggggataattgcacttctttgaggcctaccgtagtaaaggaaataacttcctatagaaagaagacagaagcattctcagaaccctcttcgtgatgtttgcattcaactcacagtgctgaacctttctttgatagttcagctttgaaacactcttcttgtagaaactgcaagtggatatttggtcctctctgaggatttcgttggaaacgggataaaccgcacagaactaaacagaagaattctcagagccctcttcgtgatgtttgcattcaactcacagtgctgaacctttctttgatagtgcagctttgaaacactctttttgtagaaactgcaagtggatgtttggtcctctctgaggatttcgttggaaacgggataaaccgcacagaactaaaacagaagcattgtcagaaacttctttgtgatgattgcattcaactcacagagttgaaggttccttttcaaacagcagtttccaatcactctttctgtggaatctgcaagtggatatttgggcctctctgaggatttcgttggaaacgggataaaacgcacagaactaaaacagaagcattctcagaaaacttctctgtgatgtttgtgttcaactcccagagtttcacgttgcttttcatagagtagttctgaaacatgcttttcgtagtgtctgcaagtggacatttggagcgctttcaggcctgtggtggaaaacgaattatggtcacataaaaactggagagaagccttctcagaaacttctctgtgatgattgcattcaactcacagagttgaaccctcctatggatagagcagtgttgaaactctctttttgtggaatctgcaagtggatatgtggacctctccgaagatgtctttggaaacgggaatatcttcacataaaaactaaacagaagcattctcagaaacttcttggtgatgtttgcattcaaatcccagagttgaaccttcctttgatagttcaggtttgaaacactctttctgtaggatctgcaagtggctatttggaccactctgtggccttcgttcgaaacgggtatatcttcgcataaaatctagacagaagcattctcagaaaatactttgtgatgattgagtttaaatcacagagctgaccattcctttggatggagcaggtttgagacacactttttgtagaatctacaagtggatatttggacctctctgaggatttcgttggaaacgggataactgcacctaactaaacggaagcattctcagaaactgctttgtgatgattgcattcacctcacagagttgaacattcctattgatagagcagtttggaaacactcttgttgtggaatgtgcaagtggagatttggagcgctttgaggcctatggtagtaaagggaatagcttcatagaaaaactagacagatgcattctcaggaactttttggtgatgtttgtattcaactcccagagttgaactttcctttggaaagagcagctatgaaacactctttttctagaatctgcaagtggacgtttggagggctttgtggtttgtggtggaaaaggaaatatcttcagctacatactagagagaagcattctcagaagcttctctgtgatgactgcattcaactcacggagttgaacactccttttgagagcgcagttttgaaactctctttctgtggcatctgcaaggggacatgtagacctctttgaagatttcgttggaaacggaatcatcttcacataaaaactatacagaagcagtctcagaatcttctttgtgatgtttgcattcaaatcccagagttgaactttcctttcaaagttcacgtttgaaacactctttttgcaggatctacaagtggatatttggaccactctgtgtccttcgttcgaaacgggtatatcttcacacgacatctagacagaagctttctcagaaaattctttgggatgattgagtggaactcacagagctgaacattccttgcgatgtagcagtttagaaacacactttctgcagaatctgcaagtgcatatttggacctctctgaggaattcgttggaaacgggataatttcagctgactaaacagaagcattctcagaaccttcttcgtgatgtctgcattcaactcacagtgtggaacctttctttgatagttcaggtttgaaacactctttttgtagaaactgcaaggggataattgcacttctttgaggcctaccgtagtaaaggaaataacttcctatagaaagaagacagaagcattctcagaaccctcttcgtgatgtttgcattcaactcacagtgctgaacctttctttgatagttcagctttgaaacactcttcttgtagaaactgcaagtggatatttggtcctctctgaggatttcgttggaaacgggataaaccgcacagaactaaacagaagaattctcagagccctcttcgtgatgtttgcattcaactcacagtgctgaacctttctttgatagtgcagctttgaaacactctttttgtagaaactgcaagtggatgtttggtcctctctgaggatttcgttggaaacgggataaaccgcacagaactaaaacagaagcattgtcagaaacttctttgtgatgattgcattcaactcacagagttgaaggttccttttcaaacagcagtttccaatcactctttctgtggaatctgcaagtggatatttgggcctctctgaggatttcgttggaaacgggataaaacgcacagaactaaaacagaagcattctcagaaacttctctgtgatgtttgtgttcaactcccagagtttcacattgcttttcatagagtagttctgaaacatgcttttcgtagtgtctacaagtggacatttggagcgctttcaggcctgtggtggaaaacgaattatggtcacataaaaactggagagaagccttctcagaaacttctctgtgatgattgcattcaactcacagagttgaaccctcctatggatagagcagtgttgaaactctctttttgtggaacctgcaagtggatatgtggacctctccgaagatgtctttggaaacgggaatatcttcacataaaaactaaacagaagcattctcagaaacttcttggtgatgtttgcattcaaatcccagagttgaaccttcctttgatagttcaggtttgaaacactctttctgtaggatctgcaagtggctatttggaccactctgtggccttcgttcgaaacgggtatatcttcgcataaaatctagacagaagcattctcagaaaatactttgtgatgattgagtttaaatcacagagctgaccattcctttggatggagcaggtttgagacacactttttgtagaatctacaagtggatatttggacctctctgaggatttcgttggaaacgggataactgcacctaactaaacggaagcattctcagaaactgctttgtgatgattgcattcacctcacagagttgaacattcctattgatagagcagtttggaaacactcttgttgtggaatgtgcaagtggagatttggagcgctttgaggcctatggtagtaaagggaatagcttcatagaaaaactagacagatgcattctcaggaactttttggtgatgtttgtattcaactcccagagttgaactttcctttggaaagagcagctatgaaacactctttttctagaatctgcaagtggacgtttggagggctttgtggtttgtggtggaaaaggaaatatcttcacctaaatactagatagaagcattctcagaagcttctctgtgatgactgcattcaactcacggagttgaacactccttttgagagcgcagttttgaaactctctttctgtggcatctgcaaggggacatgtagacctctttgaagatttcgttggaaacggaatcatcttcacataaaaactatacagaagcagtctcagaatcttctttgtgatgtttgcattcaaatcccagagttgaactttcctttcaaagttcacgtttgaaacactctttttgcaggatctacaagtggatatttggaccactctgtgtccttcgttcgaaacgggtatatcttcacacgacatctagacagaagctttctcagaaaattctttgggatgattgagtggaactcacagagctgaacattccttgcgatgtagcagtttagaaacacactttctgcagaatctgcaagtgcatatttggacctctctgaggaattcgttggaaacgggataatttcagctgactaaacagaagcattctcagaaccttcttcgtgatgtctgcattcaactcacagtgtggaacctttctttgatagttcaggtttgaaacactctttttgtagaaactgcaaggggataattgcacttctttgaggcctaccgtagtaaaggaaataacttcctatagaaagaagacagaagcattctcagaaccctcttcgtgatgtttgcattcaactcacagtgctgaacctttctttgatagttcagctttgaaacactcttcttgtagaaactgcaagtggatatttggacctctctgaggatttcgttggaaacgggataaaccgcacagaactaaacagaagcattctctgaaccttcttcgtgatgtttgcattcaactcacagtgttgaacctttctttgatagttcaggttggaaacggtctttctgtagaaactgcaagtagatatttggacctctctgaggatttcgttggaaacgggataaaccgcacagaactaaaacagaagcattcacagaaaactcttggtgacgactgagtttaactcacagagctgaacattcctttggatggagcagtttcgaaacacactatttgtagaatgtgcaagtggatatttgggcctctctgaggatttcgctggaaacgggataaaccgcacagaactaaacagaagcattctcagaaactactttgtgatgattgcattcaagtcacagagttgaacattccctttgacagagcagtttggaaactctctttgtgtagaatctgcaagtggagatatggaccgctttgaggcctatggtagtaaaggaaatagcttcatataaaagctagacagtagcattctcagaaacttctttgtgatgcttgcattcaactcacagagttgaactttcctttcgagagagaagctttgaaacactctttttccagaatctgcaagtggacatttggagggctttgaggcctgtggtggaaaaggaattatcttcccgtaaaagctagatagaagcattgtcagaaacttctttgtgatgattgcattcaactcacagagttgaaggttccttttcaaagagcagtttccaatcactctttctgtggaatctgcaagtggatatttggacctattttgaagatttcgttggaaacgggagaatcttcacaggaaagctaaacagaagcattctcagaaacttctctgtgatgtttgtgttcaactcccagagtttcacattgcttttcatagagtagttctgaaacatgcttttcgtagtgtctacaagtggacatttggagcgccttcaggcctgtggtggaaaacgaattatggtcacataaaaactggagagaagccttctcagaaacttctctgtgatgattgcattcaactcacagagttgaaccctcctatggatagagcagtgttgaaactctctttttgtggaatctgcaagtggatatgtggacctctccgaagatgtctttggaaacgggaatatcttcacataaaaactaaacagaagcattctcagaaacttcttggtgatgtttgcattcaaatcccagagttgaaccttcctttgatagttcaggtttgaaacactctttttgtaggatctgcaagtggatatttggaccactctgtggccttcgttcgaaacgggtatatcttcgcataaaatctagacagaagcattctcagaaaatactttgtgatgattgagtttaactcacagagctgaacattcctttggatggagcaggtttgagacacactttttgtagaatctacaagtggatatttggacctctctgaggatttcgttggaaacgggataactgcacctaactaaacggaagcattctcagaaactgctttgtgatgattgcattcacctcacagagttgaacattcctattgatagagcagtttggaaacactcttgttgtggaatgtgcaagtggagatttggagcgctttgaggcctatggtagtaaagggaatagcttcatagaaaaactagacagatgcattctcaggaactttttggtgatgtttgtattcaactcccagagttgaactttcctttggaaagagcagctatgaaacactctttttctagaatctgcaagtggacgtttggagggctttgtggtttgtggtggaaaaggaaatatcttcacctaaatactagatagaagcattctcagaagcttctctgtgatgactgcattcaactcacggagttgaacactccttttgagagcgcagttttgaaactctctttctgtggcatctgcaaggggacatgtagacctctttgaagatttcgttggaaacggaatcatcttcacatcaaaactatacagaagcagtctcagaatcttctttgtgatgtttgcattcaaatcccagagttgaactttcctttcaaagttcacgtttgaaacactctttttgcaggatctacaagtggatatttggaccactctgtgtccttcgttcgaaacgggtatatcttcacacgacatctagacagaagctttctcagaaaattctttgggatgattgagtggaactcacagagctgaacattccttgtgatgtagcagtttagaaacacactttctgcagaatctgcaagtgcatatttggacctctctgaggaattcgttggaaacgggataatttcagctgactaaacagaagcattctcagaaccttcttcgtgatgtctgcattcaactcacagtgtggaacctttctttgatagttcaggtttgaaacactctttttgtagaaactgcaaggggataattgcacttctttgaggcctaccgtagtaaaggaaataacttcctatagaaagaagacagaagcattctcagaaccctcttcgtgatgtttgcattcaactcacagtgctgaacctttctttgatagttcagctttgaaacactcttcttgtagaaactgcaagtggatatttggtcctctctgaggatttcgttggaaacgggataaaccgcacagaactaaacagaagaattctcagagccctcttcgtgatgtttgcattcaactcacagtgctgaacctttctttgatagtgcagctttgaaacactctttttgtagaaactgcaagtggatgtttggtcctctctgaggatttcgttggaaacgggataaaccgcacagaactaaaacagaagcattgtcagaaacttctttgtgatgattgcattcaactcacagagttgaaggttccttttcaaacagcagtttccaatcactctttctgtggaatctgcaagtggatatttgggcctctctgaggatttcgttggaaacgggataaaacgcacagaactaaaacagaagcattctcagaaacttctctgtgatgtttgtgttcaactcccagagtttcacgttgcttttcatagagtagttctgaaacatgcttttcgtagtgtctgcaagtggacatttggagcgctttcaggcctgtggtggaaaacgaattatggtcacataaaaactggagagaagccttctcagaaacttctctgtgatgattgcattcaactcacagagttgaaccctcctatggatagagcagtgttgaaactctctttttgtggaatctgcaagtggatatgtggacctctccgaagatgtctttggaaacgggaatatcttcacataaaaactaaacagaagcattctcagaaacttcttggtgatgtttgcattcaaatcccagagttgaaccttcctttgatagttcaggtttgaaacactctttctgtaggatctgcaagtggctatttggaccactctgtggccttcgttcgaaacgggtatatcttcgcataaaatctagacagaagcattctcagaaaatactttgtgatgattgagttctaaatcacagagctgaccattcctttggatggagcaggtttgagacacactttttgtagaatctacaagtggatatttggacctctctgaggatttcgttggaaacgggataactgcacctaactaaacggaagcattctcagaaactgctttgtgatgattgcattcacctcacagagttgagcattcctattgatagagcagtttggaaacactcttgttgtggaatgtgcaagtggagatttggagcgctttgaggcctatggtagtaaagggaatagcttcatagaaaaactagacagatgcattctcagaaactttttggtgatgtttgtattcaactcccagagttgaactttcctttggaaagagcagctatgaaacactctttttctagaatctgcaagtggacgtttggagggctttgtggtttgtggtggaaaaggaaatatcttcacctaaatactagatagaagcatcctcagaagcttctctgtgatgactgcattcaactcacggagttgaacactccttttgagagcgcagttttgaaactctctttctgtggcatctgcaaggggacatgtagacctctttgaagatttcgttggaaacggaatcatcttcacataaaaactatacagaagcagtctcagaatcttctttgtgatgtttgcattcaaatccccgagttgaactttcctttcaaagttcacgtttgaaacactctttttgcaggatctacaagtggatatttggaccactctgtgtccttcgttcgaaacgggtatatcttcacatgacatctagacagaagctttctcagaaaattctttgggatgattgagttgaactcacagagctgagcattccttgcgatgtagcagtttagaaacacactttctgcagaatctgcaagtgcatatttggacctctgtgaggaattcgttggaaacgggataatttcagctgactaaacagaagcattctcagaaccttcttcgtgatgtctgcattcaactcacagtgtggaacctttctttgatagttcaggtttgaaacactctttctgtagaaactgcaaggggataattgcactctttgaggagtaccgtagtaaaggaaataacttcctataaaaagaagacagaagcattctcagaaccctcttcgtgatgtttgcattcaactcacagtgctgaacctttctttgatagttcagctttgaaacactctttttgtagaaactgcaagtggatatttggtcctctctgagcatttcgttggaaacgggataaactgcacagaactaaacagaagcattctcagaaccttcttcgtgatgtttgcattcaactcacagtgttgaacctttctttgatagttcaggtttgaaacggtctttctgtagaaactgcaagtagatatttggacctctctgaggatttcgttggaaacgggataacccgcacagaactaaaacagaagcattcacagaaaactcttggtgacgactgagtttaactcacagagctgaacattcctttggatggagcagtttcgaaacacactatttgtagaatgtgcaagtggatatttaggcctctctgaggatttcgttggaaacgggataaaccgcacagaactaaacagaagcattctcagaaactactttgtgatgattgcattcaagtcacagagttgaacattccctttgacagagcagtttggaaactctctttgtgtagaatctgcaagtggagatatggaccgctttgaggcctatggtagtaaaggaaatagcttcatataaaagctagacagtagcattctcagaaacttctttgtgatgcttgcattcaactcacagagttgaactttcctttcgagagagaagctttgaaacactctttttccagaatctgcaagtggacatttggagggctttgaggcctgtggtggaaaaggaattatcttcccgtaaaagctagatagaagcattgtcagaaacttctttgtgatgattgcattcaactcacagagttgaaggttccttttcaaacagcagtttccaatcactctttctgtggaatctgcaagtggatatttggacctagtttgaagatttcgttggaaacgggataaccttcacagaaaagctaaacagaagcattctcagaaacttctctgtgatgtttgtgttcaactcccagagtttcacattgcttttcatagagtagttctgaaacatgcttttcgtagtgtctgcaagtggacatttggagcgctttcaggcctgtggtggaaaacgaattatggtcacatagaaactggagagaagccttctcagaaacttgtctgtgatgattgcattcaactcacagagttgaaccctcctatggatagagcagtgttgaaactctctttttgtggaatctgcaagtggatatgtggacctctccgaagatgtctttggaaacgggaatatcttcacatcaaaactaaacagaagcattctcagaaacttcttggtgatgtttgcattcaaatcccagagttgaaccttcctttgatagttcaggtttgaaacactctttttgtaggatctgcaagtggctacttggaccactctgtggccttcgttcgaaacgggtatatcttcgcataaaatctagacagaagcattctcagaaaatactttgtgatgattgagttgaactcacagagctgaacattcctttggatggagcaggtttgagacacactttttgtagaatctacaagtggatatttggacctctctgaggatttcgttggaaacgggataactgcacctaactaaacggaagccttctcagaaactgctttgtgatgattgcattcacctcacagagttgaacattcctattgatagagcagtttggaaacactcttgttgtggaatgtgcaagtggagatttggagcgctttgaggcctatggtagtaaagggaagagcttcatagaaaaactagacagatgcattctcaggaactttttggtgatgtttgtattcaactcccagagttgaactttcctttggaaagagcagctatgaaacactctttttctagaatctgcaagtggacgtttggagggctttgtggtttgtggtggaaaaggaaatatcttcacctaaatactagatagaagcattctcagaagcttctctgtgatgactgcattcaactcacggagttgaacactccttttgagagcgcagttttgaaactctctttctgtggcatctgcaaggggacatgtagacctctttgaagatttcgttggaaacggaatcatcttcacataaaaactatacagaagcagtctcagaatcttctttgtgatgtttgcattcaaatcccagagttgaactttcctttcaaagttcacgtttgaaacactctttttgcaggatctacaagtggatatttggaccactctgtgtccttcgttcgaaacgggtatatcttcacacgacatctagacagaagctttctcagaaaattctttgggatgattgagtggaactcacagagctgaacattccttgcgatggagcagtttagaaacacactttctgcagaatctgcaagtgcatatttggacctctctgaggaattcgttggaaacgggataatttcagctgactaaacagaagcattctcagaaccttcttcgtgatgtctgcattcaactcacagtgtggaacctttctttgatagttcaggtttgaaacactctttttgtagaaactgcaaggggataattgcacttctttgaggcctaccgtagtaaaggaaataacttcctatagaaagaagacagaagcattctcagaaccctcttcgtgatgtttgcattcaactcacagtgctgaacctttctttgatagttcagctttgaaacactcttcttgtagaaactgcaagtggatatttggtcctctctgaggatttcgttggaaacgggataaaccgcacagaactaaacagaagaattctcagagccctcttcgtgatgtttgcattcaactcacagtgctgaacctttctttgatagtgcagctttgaaacactctttttgtagaaactgcaagtggatgtttggtcctctctgaggatttcgttggaaacgggataaaccgcacagaactaaaacagaagcattgtcagaaacttctttgtgatgattgcattcaactcacagagttgaaggttccttttcaaacagcagtttccaatcactctttctgtggaatctgcaagtggatatttgggcctctctgaggatttcgttggaaacgggataaaacgcacagaactaaaacagaagcattctcagaaacttctctgtgatgtttgtgttcaactcccagagtttcacgttgcttttcatagagtagttctgaaacatgcttttcgtagtgtctgcaagtggacatttggagcgctttcaggcctgtggtggaaaacgaattatggtcacataaaaactggagagaagccttctcagaaacttctctgtgatgattgcattcaactcacagagttgaaccctcctatggatagagcagtgttgaaactctctttttgtggaatctgcaagtggatatgtggacctctccgaagatgtctttggaaacgggaatatcttcacataaaaactaaacagaagcattctcagaaacttcttggtgatgtttgcattcaaatcccagagttgaaccttcctttgatagttcaggtttgaaacactctttctgtaggatctgcaagtggctatttggaccactctgtggccttcgttcgaaacgggtatatcttcgcataaaatctagacagaagcattctcagaaaatactttgtgatgattgagtttaaatcacagagctgaccattcctttggatggagcaggtttgagacacactttttgtagaatctacaagtggatatttggacctctctgaggatttcgttggaaacgggataactgcacctaactaaacggaagcattctcagaaactgctttgtgatgattgcattcacctcacagagttgaacattcctattgatagagcagtttggaaacactcttgttgtggaatgtgcaagtggagatttggagcgctttgaggcctgtggtagtaaagggaatagcttcatagaaaaactagacagatgcattctcaggtaactttttggtgatgtttgtattcaactcccagagttgaactttcctttggaaagagcagctatgaaacactctttttctagaatctgcaagtggacgtttggagggctttgtggtttgtggtggaaaaggaaatatcttcacctaaatactagatagaagcattctcagaagcttctctgtgatgactgcattcaactcacggagttgaacactccttttgagagcgcagttttgaaactctctttctgtggcatctgcaaggggacatgtagacctctttgaagatttcgttggaaacggaatcatctaacacataaaaactatacagaagcagtctcagaatcttctttgtgatgtttgcattcaaatcccagagttgaactttcctttcaaagttcacgtttgaaacactctttttgcaggatctacaagtggatatttggaccactctgtgtccttcgttcgaaacgggtatatcttcacacgacatctagacagaagctttctcagaaaattctttgggatgattgagtggaactcacagagctgaacattccttgcgatgtagcagtttagaaacacactttctgcagaatctgcaagtgcatatttggacctctctgaggaattcgttggaaacgggataatttcagctgactaaacagaagcattctcagaaccttcttcgtgatgtctgcattcaactcacagtgtggaacctttctttgatagttcaggtttgaaacactctttttgtagaaactgcaaggggataattgcacttctttgaggcctaccgtagtaaaggaaataacttcctatagaaagaagacagaagcattctcagaaccctcttcgtgatgtttgcattcaactcacagtgctgaacctttctttgatagttcagctttgaaacactcttcttgtagaaactgcaagtggatatttggtcctctctgaggatttcgttggaaacgggataaaccgcacagaactaaacagaagaattctcagagccctcttcgtgatgtttgcattcaactcacagtgctgaacttttctttgatagtgcagctttgaaacactctttttgtagaaactgcaagtggatgtttggtcctctctgaggatttcgttggaaacgggataaaccgcacagaactaaaacagaagcattgtcagaaacttctttgtgatgattgcattcaactcacagagttgaaggttccttttcaaacagcagtttccaatcactctttctgtggaatctgcaagtggatatttgggcctctctgaggatttcgttggaaacgggataaaacgcacagaactaaaacagaagcattctcagaaacttctctgtgatgtttgtgttcaactcccagagtttcacgttgcttttcatagagtagttctgaaacatgcttttcgtagtgtctgcaagtggacatttggagcgctttcaggcctgtggtggaaaacgaattatggtcacataaaaactggagagaagccttctcagaaacttctctgtgatgattgcattcaactcacagagttgaaccctcctatggatagagcagtgttgaaactctctttttgtggaatctgcaagtggatatgtggacctctccgaagatgtctttggaaacgggaatatcttcacataaaaactaaacagaagcattctcagaaacttcttggtgatgtttgcattcaaatcccagagttgaaccttcctttgatagttcaggtttgaaacactctttttgtaggatctgcaagtggctatttggaccactctgtggccttcgttcgaaactggtatatcttcgcataaaatctagacagaagcattctcagaaaatactttgtgatgattgagtttaaatcacagagctgaccattcctttggatggagcaggtttgagacacactttttgtagaatctacaagtggatatttggacctctctgaggatttcgttggaaacgggataactgcacctaactaaacggaagcattctcagaaactgctttgtgatgattgcattcacctcacagagttgaacattcctattgatagagcagtttggaaacactcttgttgtggaatgtgcaagtggagatttggagcgctttgaggcctatggtagtaaagggaatagcttcatagaaaaactagacagatgcattctcaggaactttttggtgatgtttgtattcaactcccagagttgaactttcctttggaaagagcagctatgaaacactctttttctagaatctgcaagtggacgtttggagggctttgtggtttgtggtggaaaaggaaatatcttcacctaaatactagagagaagcattctcagaagcttctctgtgatgactgcattcaactcacggagttgaacactccttttgagagcgcagttttgaaactctctttctgtggcatccgcaaggggacatgtagacctctttgaagatttcgttggaaacggaatcatcttcacataaaaactatacagaagcagtctcagaatcttctttgtgatgtttgcattcaaatcccagagttgaacttgcctttcaaagttcacgtttgaaacactctttttgcaggatctacaagtggatatttggaccactctgtgtccttcgttcgaaacgggtatatcttcacatgacatctagacagaagctttctcagaaaattctttgggatgattgagttgaactcacagagctgagcattccttgcgatgtagcagtttagaaacacactttctgcagaatctgcaagtgcatatttggacctctgtgaggaattcgttggaaacgggataatttcagctgactaaacagaagcattctcagaaccttcttcgtgatgtctgcattcaactcacagtgtggaacctttctttgatagttcaggtttgaaacactctttttgtagaaactgcaaggggataattgcactctttgaggagtaccgtagtaaaggaaataacttcctataaaaagaagacagaagcattcacagaaaagtcttggtgacgactgagtttaactcccagagctgaacattcctttggatggagcagtttcgaaacacactatttgtagaatctgcaagtggatatttgggcctctctgaggatttcgttggaaacgggataaaacgcacagaactaaaacagaagcattctcagaaactactttgtgatgattgcattcaagtcacagagttgaacattccctttgacagagcagtttggaaactctctttgtgtagaatctgcaagtggagatatggaccgctttgaggcctatggtagtaaaggaaatagcttcatataaaagctagacagtagcattctcagaaacttctttgtgatgcttgcattcaactcacagagttgaactttcctttcgagagagaagctttgaaacactctttttccagaatctgcaagtggacatttggagggctttgaggcctgtggtggaaaaggaattatcttcccgtaaaagctagatagaagccttctcagaaacttctctgtgatgattgcattcaactcacagagttgaaggttccttttcaaagaacagtttccaatcactctttctgtggagtctgcaagtggatatttggacctattttgaagatttcgttggaaacgggagaatcttcacaggaaagctaaacagaagcattctcagaaacttctctgtgatgtttgtgttcaactcccagagtttcacattgcttttcatagagtagttctgaaacatgcttttcgtagtgtctacaagtggacatttggagcgctttcaggcctgtggtggaaaacgaattatggtcacataaaaactggagagaagccttctcagaaacttctctgtgatgattgcattcaactcacagagttgaaccctcctatggatagagcagtgttgaaactctctttttgtggaatctgcaagtggatatgtggacctctccgaagatgtctttggaaacgggaatatcttcacataaaaactaaacagaagcattctcagaaacttcttggtgatgtttgcattcaaatcccagagttgaaccttcctttgatagttcaggtttgaaacactctttctgtaggatctgcaagtggctatttggaccactctgtggccttcgttcgaaacgggtatatcttcgcataaaatctagacagaagcattctcagaaaatactttgtgatgattgagtttaaatcacagagctgaccattcctttggatggagcaggtttgagacacactttttgtagaatctacaagtggatatttggacctctctgaggatttcgttggaaacgggataactgcacctaactaaacggaagcattctcagaaactgctttgtgatgattgcattcacctcacagagttgaacattcctattgatagagcagtttggaaacactcttgttgtggaatgtgcaagtggagatttggagcgctttgaggcctatggtagtaaagggaatagcttcatagaaaaactagacagatgcattctcaggaactttttggtgatgtttgtattcaactcccagagttgaactttcctttggaaagagcagctatgaaacactctttttctagaatctgcaagtggacgtttggagggctttgtggtttgtggtggaaaaggaaatatcttcacctaaatactagatagaagcattctcagaagcttctctgtgatgactgcattcaactcacggagttgaacactccttttgagagcgtagttttgaaactctctttctgtggcatctgcaaggggacatgtagacctctttgaagatttcgttggaaacggaatcatcttcacataaaaactatacagacagtctcagaatcttctttgtgatgtttgcattcaaatcccagagttgaactttcctttcaaagttcacgtttgaaacactctttttgcaggatctacaagtggatatttggaccactctgtgtccttcgttcgaaacggctatatcttcacacgacatctagacagaggctttctcagaaaattctttgggatgattgagtggaactcacagagctgaacattccttgcgatgtagcagtttagaaacacactttctgcagaatctgcaagtgcatatttggacctctctgaggaattcgttggaaacgggataatttcagctgactaaacagaagcattctcagaaccttcttcgtgatgtctgcattcaactcacagtgtggaacctttctttgatagttcaggtttgaaacactctttttgtagaaactgcaaggggataattgcacttctttgaggcctaccgtagtaaaggaaataacttcctatagaaagaagacagaagcattctcagaaccctcttcgtgatgtttgcattcaactcacagtgctgaacctttctttgatagttcagctttgaaacactcttcttgtagaaactgcaagtggatatttggtcctctctgaggatttcgttggaaacgggataaaccgcacagaactaaacagaagaattctcagagccctcttcgtgatgtttgcattcaactcacagtgctgaacctttctttgatagtgcagctttgaaacactctttttgtagaaactgcaagtggatgtttggtcctctctgaggatttcgttggaaacgggataaaccgcacagaactaaaacagaagcattgtcagaaacttctttgtgatgattgcattcaactcacagagttgaaggttccttttcaaacagcagtttccaatcactctttctgtggaatctgcaagtggatatttgggcctctctgaggatttcgttggaaacgggataaaacgcacagaactaaaacagaagcattctcagaaacttctctgtgatgtttgtgttcaactcccagagtttcacgttgcttttcatagagtagttctgaaacatgcttttcgtagtgtctgcaagtggacatttggagcgctttcaggcctgtggtggaaaacgaattatggtcacataaaaactggagagaagccttctcagaaacttctctgtgatgattgcattcaactcacagagttgaaccgtcctatgcatagagcagtgttgaaactctctttttgtggaatctgcaagtggatatgtggacctctccgaagatgtctttggaaacgggaatatcttcacataaaaactaaacagaagcattctcagaaacttcttggtgatgtttgcattcaaatcccagagttgaaccttcctttgatagttcaggtttgaaacactctttctgtaggatctgcaagtggctatttggaccactctgtggccttcgttcgaaacgggtatatcttcgcataaaatctagacagaagcattctcagaaaatactttgtgatgattgagtttaaatcacagagctgaccattcctttggatggagcaggcttgagacacactttttgtagaatctacaagtggatatttggacctctctgaggatttcgttggaaacgggataactgcacctaactaaacggaagcattctcagaaactgctttgtgatgattgcattcacctcacagagttgaacattcctattgatagagcagtttggaaacactcttgttgtggaatgtgcaagtggagatttggagcgctttgaggcctgtggtagtaaagggaatagcttcatagaaaaactagacagatgcattctcaggaactttttggtgatgtttgtattcaactcccagagttgaactttcctttggaaagagcagctatgaaacactctttttctagaatctgcaagtggacgtttggagggctttgtggtttgtggtggaaaaggaaatatcttcacctaaatactagatagaagcattctcagaagcttctctgtgatgactgcattcaactcacggagttgaacactccttttgagagcgcagttttgaaactctctttctgtggcatctgcaaggggacatgtagacctctttgaagatttcgttggaaacggaatcatcttcacataaaaactatacagaagcagtctcagaatcttctttgtgatgtttgcattcaaatcccagagttgaactttcctttcaaagttcacgtttgaaacactctttttgcaggatctacaagtggatatttggaccactctgtgtccttcgttcgaaacgggtatatcttcacacgacatctagacagaagctttctcagaaaattctttgggatgattgagtggaactcacagagctgaacattccttgcgatgtagcagtttagaaacacactttctgcagaatctgcaagtgcatatttggacctctctgaggaattcgttggaaacgggataatttcagctgactaaacagaaagcattctcagaaccttcttcgtgatgtctgcattcaactcacagtgtggaacctttctttgatagttcaggtttgaaacactctttttgtagaaactgcaaggggataattgcacttctttgaggcctaccgtagtaaaggaaataacttcctatagaaagaagacagaagcattctcagaaccctcttcgtgatgtttgcattcaactcacagtgctgaacctttctttgatagttcagctttgaaacactcttcttgtagaaactgcaagtggatatttggtcctactactgaggatttcgttggaaacgggataaaccgcacagaactaaacagaagcattctcagaaccttcttcgtgatgtttgcattcaactcacagtgttgaacctttctttgatagttcaggtttgaaacggtctttctgtagaaactgcaagtagatatttggacctctctgaggatttcgttggaaacgggataaaccgcacagaactaaaacagaagcattcacagaaaactcttggtgacgactgagtttaactcacagagctgaacattcctttggatggagcagtttcgaaacaccctatttgtagaatgtgcaagtggatatgtgggcctctctgaggatttcgttggaaacgggataaaccgcacagaactaaacagaagcattctcagaaactactttgtgatgattgcattcaagtcacagagttgaacattccctttgacagagcagtttggaaactctctttgtgtagaatctgcaagtggagatatggaccgctttgaggcctatggtagtaaaggaaatagcttcatataaaagctagacagtagcattctcagaaacttctttgtgatgcttgcattcaactcacagagttgaactttcctttcgagagagaagctttgaaacactctttttccagaatctgcaagtggacatttggagggctttgaggcctgtggtggaaaaggaattatcttcccgtaaaagctagatagaagcattgtcagaaacttctttgtgatgattgcattcaactcacagagttgaaggttccttttcaaagagcagtttccaatcactctttctgtggaatctgcaagtggatatttggacctattttgaagatttcgttggaaacgggagaatcttcacaggaaagctaaacagaagcattctcagaaacttctctgtgatgtttgtgttcaactcccagagtttcacattgcttttcatagagtagttctgaaagacgcttttcgtagtctctacaattgggcatttggagcgctttcaggcctgtggtggaaaagaattatggtcacataaaaactggagagaaagccttctcagaaacttctctgtgatgattgcattcaactcacagcagttgaaccctcctatggatagagcagtgttgaaactctctttttgtggaatctgcaagtggatatgtggacctctccgaagatgtctttggaaacgggaatatcttcacataaaaactaaacagaagcattctcagaaacttcttggtgatgtttgcattcaaatcccagaagttgaaccttcctttgatagttcaggtttgaaacactctttttgtaggatctgcaagtggatatttggaccactctgtggccttcgttcgaaacggctatatcttcgcataaaatctagacagaagcattctcagaaaatactttgtgatgattgagtttaactcacagagctgaacattcctttggatggagcaggtttgagacacaccttttgtagaatctacaagtggatatttggacctctctgaggatttcgttggaaacgggataactgcacctaactaaacggaagcattctcagaaactgctttgtgatgattgcattcacctcacagagttgaacattcctattgatagagcagtttggaaacactcttgttgtggaatgtgcaagtggagatttggagcgctttgaggcctatggtagtaaagggaatagcttcatagaaaaactagacagatgcattctcaggaactttttggtgatgtttgtattcaactcccagagttgaactttcctttggaaagagcagctatgaaacactgtttttctagaatctgcaagtggacgtttggagggctttgtggtttgtggtggaaaaggaaatatcttcacctaaatactagatagaagcatcctcagaagcttctctgtgatgactgcattcaactcacggagttgaacactccttttgagagcacagttttgaaactctctttctgtggcatctgcaaggggacatgtagacctctttgaagatttcgttggaaacggaatcatcttcacataaaaactacacagaagcagtctcagaatcttctttgtgatgtttgcattcaaatccccgagttgaactttcctttcaaagttcacgtttgaaacactctttttgcaggatctacaagtggatatttggaccactctgtgtccttcgttcgaaacgggtatatcttcacatgacatctagacagaagctttctcagaaaattctttgggatgattgagtagaactcacagagctgagcattccttgcgatgtagcagtttagaaacacactttctgcagaatctgcaagtgcatatttggacctctgtgaggaattcgttggaaacgggataatttcagctgactaaacagaagcattctcagaaccctcttcgtgatgtttgcattcaactcacagtgctgaacctttctttgatagttcagctttgaaacactctttctgtagaaactgcaaggggataattgcactctttgaggagtaccgtagtaaaggaaataacttcctataaaaagaagacagaagcattctcagaaccttcttcgtgatgtttgcattcaactcacagtgttgaacctttctttgatagttcaggtttgaaacggtctttctgtagaaactgcaagtagatatttggacctctctgaggatttcgttggaaacgggataacccgcacagaactaaaacagaagcattcacagaaaactcttggtgacgactgagtttaactcacagagctgaacattcctttggatggagcagtttcgaaacacactatttgtagaatctgcaagtggatatttgggccactctgaggatttcgttggaaacgggataaaacgtacagaactaaaacagaagcattctcagaaactactttgtgatgattgcattcaagtcacagagttgaacattccctttgacagagcagtttggaaactctctttgtgtagaatctgcaagtggagatatggaccgctttgaggcctatggtagtaaaggaaatagcttcatataaaagctagacagtagcattctcagaaacttctttgtgatgcttgcattcaactcacagagttgaactttcctttcgagagagaagctttgaaacactctttttccagaatctgcaagtggacatttggagggctttgaggcctgtggtggaaaaggaattatcttcccgtaaaagctagatagaagcattgtcagaaacttctttgtgatgattgcattcaactcacagagttgaaggttccttttcaaagagcagtttccaatcactctttgtgtggaatctgcaagtggatatttggacctattttgaagatttcgttggaaacgggagaatcttcacaggaaagctaaacagaagcattctcagaaacttctctgtgatgtttgtgttcaactcccagagtttcacattgcttttcatagagtagttctgaaacatgcttttcgtagtgtctacaagtggacatttggagcgctttcaggcctgtggtggaaaacgaattatggtcacataaaaactggagagaagccttctcagaaacttctctgtgatgattgcattcaactcacagagttgaaccctcctatggatagagcagtgttgaaactctctttttgtggaatctgcaagtggatatgtggacctctccgaagatgtctttggaaacgggaatatcttcacataaaaactaaacagaagcattctcagaaacttcttggtgatgtttgcattcaaatcccagagttgaaccttcctttgatagttcaggtttgaaacactctttttgtaggatctgcaagtggatatttggaccactctgtggccttcgttcgaaacgggtatatcttcgcataaaatctagacagaagcattctcagaaaatactttgtgatgattgagtttaactcacagagctgaacattcctttggatggagcaggtttgagacacactttttgtagaatctacaagtggatatttggacctctctgaggatttcgttggaaacgggataactgcacctaactaaacggaagcattctcagaaactgctttgtgatgattgcattcacctcacagagttgaacattcctattgatagagcagtttggaaacactcttgttgtggaatgtgcaagtggagatttggagcgctttgaggcctatggtagtaaagggaatagcttcatagaaaaactagacagatgcattctcaggaactttttggtgatgtttgtattcaactcccagagttgaactttcctttggaaagagcagctatgaaacactgtttttctagaatctgcaagtggacgtttggagggctttgtggtttgtggtggaaaaggaaatatcttcacctaaatactagatagaagcatcctcagaagcttctctgtgatgactgcattcaactcacggagttgaacactccttttgagagcgcagttttgaaactctctttctgtggcatctgcaaggggacatgtagacctctttgaagatttcgttggaaacggaatcatcttcacataaaaactatacagaagcagtctcagaatcttctttgtgatgtttgcattcaaatccccgagttgaactttcctttcaaagttcacgtttgaaacactctttttgcaggatctacaagtggatatttggaccactctgtgtccttcgttcgaaacgggtatatcttcacatgacatctagacagaagctttctcagaaaattctttgggatgattgagttgaactcacagagctgagcattccttgcgatgtagcagtttagaaacacactttctgcagaatctgcaagtgcatatttggacctctgtgaggaattcgttggaaacgggataatttcagctgactaaacagaagcattctcagaaccttcttcgtgatgtctgcattcaactcacagtgtggaacctttctttgatagttcaggtttgaaacactctttttgtagaaactgcaaggggataattgcactctttgaggagtaccgtagtaaaggaaataacttcctataaaaagaagacagaagcattctcagaaccctcttcgtgatgtttgcattcaactcacagtgctgaacctttctttgatagttcagctttgaaacactctttttgtagaaactgcaagtggatatttggtcctctctgagcatttcgttggaaacgggataaactgcacagaactaaacagaagcattctcagaaccttcttcgtgatgtttgcattcaactcacagtgttgaacctttctttgatagttcaggtttgaaacggtctttctgtagaaactgcaagtagatatttggacctctctgaggatttcgttggaaacgggataacccgcacagaactaaaacagaagcattcacagaaaactcttggtgacgactgagtttaactcacagagctgaacattcctttggatggagcagtttcgaaacacactatttgtagaatgtgcaagtggatatttgggcctctctgaggatttcgttggaaacgggataaaccgcacagaactaaacagaagcattctcagaaactactttgtgatgattgcattcaagtcacagagttgaacattccctttgacagagcagtttggaaactctctttgtgtagaatctgcaagtggagatatggaccgctttgaggcctatggtagtaaaggaaatagcttcatataaaagctagacagtagcattctcagaaacttctttgtgatgcttgcattcaactcacagagttgaactttcctttcgagagagaagctttgaaacactctttttccagaatctgcaagtggacatttggagggctttgaggcctgtggtggaaaaggaattatcttcccgtaaaagctagatagaagcattgtcagaaacttccttgtgatgattgcattcaactcacagagttgaaggttccttttcaaagagcagtttccaatcactctttctgtggaatctgcaagtggatatttggacctattttgaagatttcgttggaaacgggagaatcttcacaggaaagctaaacagaagcattctcagaaacttctctgtgatgtttgtgttcaactcccagagtttcacattgcttttcatagagtagttctgaaacatgcttttcgtagtgtctacaagtggacatttggagcgcttccagtcctgtggtggaaaacgaattatggtcacataaaaactggagagaagctttctcagaaacttctctgtgatgattgcattcaactcacagagttgaaccctcctatggatagagcagtgttgaaactctctttttgtggaatctgcaagtggatatgtggacctctccgaagatgtctttggcaacgggaatatcttcacataaaaactaaacagaagcattctcagaaacttcttggtgatgtttgcattcaaatcccagagttgaaccttcctttgacagttcaggtttgaaacactctttttgtaggatctgcaagtggatatttggaccactctgtggccttcgttcgaaacgggtacatcttcgcataaaatctagacagaagcattctcagaaaatactttgtgatgattgagtttaactcacagagctgaacattcctttggatggagcaggtttgagacacactttttgtagaatctacaagtggatatttggacctctctgaggatttcgttggaaacgggataactgcacctaactaaacggaagcattctcagaaactgctttgtgatgattgcattcacctcacagagttgaacattcctattgatagagcagtttggaaacactcttgttgtggaatgtgctagtggagatttggagcgctttgaggcctatggtagtaaagggaatagcttcatagaaaaactagacagatgcattctcaggaactttttggtgatgtttgtattcaactcccagagttgaactttcctttggaaagagcagctatgaaacactctttttctagaatctgcaagtggacgtttggagggctttgtggtttgtggtggaaaaggaaatatcttcacctaaatactagagagaagcattctcagaagcttctctgtgatgactgcattcaactcacggagttgaacactccttttgagagcgcagttttgaaactctctttctgtggcatccgcaaggggacatgtagacctctttgaagatttcgttggaaacggaatcatcttcacataaaaactatacagaagcattctcagaaacttcttggtgatgtttgcattcaaatcccagagttgaaccttcctttgacagttcaggtttgaaacactctttttgcaggatctacaagtggatatttggaccactctgtgtccttcgttcgaaacgggtatatcttcacatgacatctagacagaagcattctcagaaaatactttgtgatgattgagtttaactcacagagctgaacattcctttggatggagcaggtttgagacacactttttgtagaatctacaagtggatatttggacctctctgaggatttcgttggaaacgggataactgcacctaactaaacggaagcattctcagaaactgctttgtgatgattgcattcacctcacagagttgaacattcctattgatagagcagtttggaaacactcttgttgtggaatgtgcaagtggagatttggagcgctttgaggcctatggtagtaaagggaatagcttcatagaaaaactagacagatgcattctcaggaactttttggtgatgtttgtattcaactcccagagttgaactttcctttggaaagagcagctatgaaacactctttttctagaatctgcaagtggacgtttggagggctttgtggtttgtggtggaaaaggaaatatcttcacctaaatactagatagaagcattctcagaagcttctctgtgatgactgcattcaactcacggagttgaacactccttttgagagcgcagttttgaaactctctttctgtggcatctgcaaggggacatgtagacctctttgaagatttcgttggaaacggaatcatcttcacataaaaactatacagaagcagtctcagaatcttctttgtgatgtttgcattcaaatcccagagttgaactttcctttcaaagttcacgtttgaaacactctttttgcaggatctacaagtggatatttggaccactctgtgtccttcgttcgaaacgggtatatcttcacacgacatctagacagaagctttctcagaaaattctttgggatgattgagtggaactcacagagctgaacattccttgcgatgtagcagtttagaaacacactttctgcagaatctgcaagtgcatatttggacctctctgaggaattcgttggaaacgggataatttcagctgactaaacagaagcattctcagaaccttcttcgtggtgtctgcattcaactcacagtgtggaacctttctttgatagttcaggtttgaaacactctttttgtagaaactgcaaggggataattgcacttctttgaggcctaccgcagtaaaggaaataacttcctatagaaagaagacagaagcattctcagaaccctcttcgtgatgtttgcattcaactcacagtgctgaacctttctttgatagttcagctttgaaacactcttcttgtagaaactgcaagtggatatttggtcctctctgaggatttcgttggaaacgggataaaccgcacagaactaaacagaagaattctcagagccctcttcgtgatgtttgcattcaactcacagtgctgaacctttctttgatagtgcagctttgaaacactctttttgtagaaactgcaagtggatgtttggtcctctctgaggatttcgttggaaacgggataaaccgcacagaactaaaacagaagcattgtcagaaacttctttgtgatgattgcattcaactcacagagttgaaggttccttttcaaacagcagtttccaatcactctttctgtggaatctgcaagtggatatttgggcctctctgaggatttcgttggaaacgggataaaacgcacagaactaaaacagaagcattctcagaaacttctctgtgatgtttgtgttcaactcccagagtttcacgttgcttttcatagagtagttctgaaacatgcttttcatagtgtctgcaagtggacatttggagcgctttcaggcctgtggtggaaaacgaattatggtcacataaaaactggagagaagccttctcagaaacttctctgtgatgattgcattcaactcacagagttgaaccctcctatggatagagcagtgttgaaactctctttttgtggaatctgcaagtggatatgtggacctctccgaagatgtctttggaaacgggaatatcttcacataaaaactaaacagaagcattctcagaaacttcttggtgatgtttgcattcaaatcccagagttgaaccttcctttgatagttcaggtttgaaacactctttctgtaggatctgcaagtggctatttggaccactctgtggccttcgttcgaaacgggtatatcttcgcataaaatctagacagaagcattctcagaaaatactttgtgatgattgagtttaaatcacagagctgaccattcctttggatggagcaggtttgagacacactttttgtagaatctacaagtggatatttggacctctctgaggatttcgttggaaacgggataactgcacctaactaaacggaagcattctcagaaactgctttgtgatgattgcattcacctcacagagttgaacattcctattgatagagcagtttggaaacactcttgttgtggaatgtgcaagtggagatttggagcgctttgaggcctgtggtagtaaagggaatagcttcatagaaaaactagacagatgcattctcaggaacttctttttggtgatgtttgtattcaactcccagagttgaactttcctttggaaagagcagctatgaaacactctttttctagaatctgcaagtggacgtttggagggctttgtggtttgtggtggaaaaggaaatatcttcacctaaatactagatagaagcattctcagaagcttctctgtgatgactgcattcaactcacggagttgaacactccttttgagagcgcagttttgaaactctctttctgtggcatctgcaaggggacatgtagacctctttgaagatttcgttggaaacggaatcatcttcacataaaaactatacagaagcagtctcagaatcttctttgtgatgtttgcattcaaatcccagagttgaactttcctttcaaagttcacgtttgaaacactctttttgcaggatctacaagtggatatttggaccactctgtgtccttcgttcgaaacgggtataacttcacacgacatctagacagaagctttctcagaaaattctttgggatgattgagtggaactcacagtagctgaacattccttgcgatggagcagtttagaaacacactttctgcagaatctgcaagtgcatatttggacctctctgaggaattcgttggaaacgggataatttcagctgactaaacagaagcattctcagaaccttcttcgtgatgtctgcattcaactcacagtgtggaacctttctttgatagttcaggtttgaaacactctttttgtagaaactgcaagaggataattgcacttctttgaggcctaccgtagtaaaggaaataacttcctatagaaagaagacagaagcattctcagaaccctcttcgtgatgtttgcattcaactcacagtgctgaacctttctttgatagttcagctttgaaacactctttttgtagaaactgcaagtggatatttggtcctctctgaggatttcgttggaaacgggataaactgcacagaactaaacagaagcattctcagaaccttcttcgtgatgtttgcattcaactcacagtgttgaacctttctttgatagttcaggtttgaaacggtctttctgcagaaactgcaagtagatatttggaccgctctgaggatttcgttggaaacgggataacccgcacagaactaaaacagaagcattcacagaaaactcttggtgacgactgagtttaactcacagagctgaacattcctttggatggagcagtttcgaaacacactatttgtagaatgtgcaagtggatatttaggcctctctgaggatttcgttggaaacgggataaaccgcacagaactaaacagaagcattctcagaaactactttgtgatgattgcattcaagtcacagagttgaacattccctttgacagagcagtttggaaactctctttgtgtagaatctgcaagtggagatatggaccgctttgaggcctatggtagtaaaggaaatagcttcatataaaagctagacagtagcattctcagaaacttctttgtgatgcttgcattcaactcacagagttgaactttcctttcgagagagaagctttgaaacactctttttccagaatctgcaagtggacatttggagggctttgaggcctgtggtggaaaaggaattatcttcccgtaaaagctagatagaagcattgtcagaaacttctttgtgatgattgcattcaactcacagagttgaaggttccttttcaaacagcagtttccaatcactctttctgtggaatgtgcaagtggatatttggacctctttgaagatttcgttggaaacgggagaatcttcacagaaaagctaaacagaagcattctgagaaacttctctgtgatgtttgtgttcaactcccagagtttcacattgcttttcatagagtagttctgaaacatgcttttcgtagtgtctgcaagtggacatttggagcgctttcaggcctgtggtggaaaacgatttatggtcacataaaaactggagagaagcctcctcagaaacttccctgtgatgattgcattcaactcacagagttgaaccctcctatggatagagcagtgttgaaactctctttttgtggaatctgcaagtggatatgtggacctctccgaagatgtctttggaaacgggaatatcttcacataaaaactaaacagaagcattctcagaaacttcttggtgatgtttgcattcaaataccagagttgaaccttcctttgatagttcaggtttgaaacactctttttgtaggatctgcaagtggatatttggaccactctgtggccttctttcgaaacgggtatatcttcgcataaaatctagacagaagcattctcagaaaacactttgtgatgattgagttgaactcacagagctgaacattcctttggatggagcaggtttgagacacactttttgtagaatctacaagtggatatttggacctctctgaggatttcgttggaaacgggataactgcacctaactaaacggaagcattctcagaaactgctttgtgatgattgcattcacctcacagagttgaacattcctattgatagagcagtttggaaacactcttgttgtggaatgtgcaagtggagatttggagcgctttgaggcctatggtagtaaagggaatagcttcatagaaaaactagacagatgcattctcaggaactttttggtgatgtttgtattcaactcccaagagttgaactttcctttggaaagagcagctatgaaacactctttttctagaatctgcaagtggacgtttggagggctttgtggtttgtggtggaaaaggaaatatcttcacctaaatactagatagaagcattctcagaagcttctctgtgatgactgcattcaactcacggagttgaacactccttttgagagcgcagttttgaaactctctttctctggcatctgcaaggggacatgtagacctctttgaagatttcgttggaaacggaatcatcttcacataaaaactatacagaagcagtctcagaatcttctttgtgatgtttgcattcaaatcccagagttgaactttcctttcaaagttcacgtttgaaacactctttttgcaggatctacaagtggatatttggaccactctgtgtccttcgttcgaaacgggtatatcttcacatgacatctagacagaagctttctcagaaaattgtttgggatgattgatttgaactcacagagctgagcattccttgtgatgtagcagtttagaaacacactttctgcagaatctgcaagtgcatatttggacctctctgaggaattcgttggaaacgggataatttcagctgactaaacagaagcattctcagaaccttcttcgtgatgtctgcattcaactcacagtgtggaacctttctttgatagttcaggtttgaaacactctttttgtagaaactgcaaggggataattgcactctttgaggagtaccgtagtaaaggaaataacttcctataaaaagaagacagaagcattctcagaaccctcttcgtgatgtttgcattcaactcatagtgctgaacctttctttgatagttcagctttgaaacactctttttgtagaaactgcaaatggatatttggtcctctctgaggatttcgttggaaaagggataaaacgcacagaactaaacagaagcattctcagaaccttcttcgtgatgtttgcattcaactcacagtgttgaacctttctttgatagttcaggttggaaacggtctttctgtagaaactgcaagtagatatttggacctctctgaggatttcgttggaaacgggataaaccgcacagaactaaaacagaagcattcacagaaaactcttggtgacgactgagtttaactcacagagctgaacattcctttggatggagcagtttcaaaacacactatttgtagaatgtgcaagtggatatttgggcctctctgaggatttcgttggaaaagggataaaccgcacagaactaaacagaagcattctcagaaactactttgtgatgattgcattcaagtcacagagttgaacattccctttgacagggcagtttggaaactctctttgtgtagaatctgcaagtggagacatggaccgctttgaggcctatggtagtaaagtaaatagcttcatataaaagctagacagtagcattctcagaaacttctttgtgatgcttgcattcaactcacagagttgaactttcctttcgagagagaagctttgaaacactctttttccagaatctgcaagtggacatttggagggctttgaggcctgtggtggaaaatgaattatcttcccgtataagctagatagaagcattgtcagaaacttctttgtgatgattgcattcaactcacagtagttgaaggttccttttcaaagagcagtttccaatcactctttctgtggaatctgcaagtggatatttggacctattttgaagatttcgttggaaacgggagaatcttcacaggaaagctaaacagaagcattctcagaaacttctctgtgatgtttgtgttcaactcccagagtttcacattgcttttcatagagtagttctgaaacatgcttttcgtagtgtctacaagtggacatttggagcgctttcaggcctgtggtggaaaacgaattatggtcacataaaaactggagagaagccttctcagaaacttctctgtgatgattgcattcaactcacagatttgaaccctcctatggatagagcagtgttgaaactctctttttgtggaatctgcaagcggatatgtggacctctccgaagatgtctttggcaacgggaatatcttcacataaaaactaaacagaagcattctcagaaacttcttgatgatgtttgcattcaaatcccagagttgaaccttcctttgagagttcaggtttgaaacactctttttgtaggatctgcaagtggatatttggaccactctgtggccttcgttccaaacgggtacatcttcgcataaaatctagacagaagcattctcagaaaatactttgtgatgattgagtttaactcacagagctgaacattcctttggatggagcaggtttgagacacaccttttgtagaatctacaagtggatatttggacctctctgaggatttcgttggaaacgggataactgcacctaactaaacggaagcattctcagaaactgctttgtgatgattgcattcacctcacagagttgaacattcctattgatagagcagtttggaaacactcttgttgtggaatgtgcaagtggagatttggagcgctttgaggcctatggtagtaaagggaatagcttcatagaaaaactagacagatgcattctcaggaactttttggtgatgtttgtattcaactcccagagttgaactttcctttggaaagagcagctatgaaacactctttttctagaatctgcaagtggacgtttggagggctttgtggtttgtggtggaaaaggaaatatcttcacctaaatactagatagaagcattctcagaagcttctctgagatgactgcattcaactcacggagttgaacactccttttgagagcgcagttttgaaactctctttctgtggcatctgcaaggggacatgtagacctctttgaagatttcgttggaaacggaatcatcttcacataaaaactatacagaagcagtctcagaatcttctttgtgatgtttgcattcaaatccccgagttgaactttcctttcaaagttcacgtttgaaacactctttttgcaggatctacaagtggatatttggaccactctgtgtccttcgttcgaaacgggtatatcttcacatgacatctagacagaagctttctcagaaaattctttgggatgattgagtagaactcacagagctgagcattccttgcgatgtagcagtttagaaacacactttctgcagaatctgcaagtgcatatttggacctctgtgaggaattcgttggaaacgggataatttcagctgactaaacagaagcattctcagaaccttcttcgtgatgtctgcattcaactcacagtgtggaacctttctttgatagttcaggtttgaaacactctttctgtagaaactgcaaggggataattgcactctttgaggagtaccgtagtaaaggaaataacttcctataaaaagaagacagaagcattctcagaaccctcttcgtgatgtttgcattcaactcacagtgctgaacctttctttgatagttcagctttgaaacactctttttgtagaaactgcaagtggatatttggtcctctctgaggatttcgttggaaacgggataaactgcacagaactaaacagaagcattctcagaaccttcttcgtgatgtttgcattcaactcacagtgttgaacctttctttgatagttcaggttggaaacggtctttctgtagaaactgcaagtagatatttggacctctctgaggatttcgttggaaacgggataacccgcacagaactaaaacagaagcattcagaaaaaactcttggtgacgactgagtttaactcacagagctgaacattcctttggatggagcagtttcgaaacacactatttgtagaatgtgcaagtggatatttgggcctctctgaggatttcgttggaaacgggataaaccgcacagaactaaacagaagcattctcagaaactactttgtgatgattgcattcaagtcacagagttgaacattccctttgacagagcagtttggaaactctctttgtgtagaatctgcaagtggagatatggaccgctttgaggcctatggtagtaaaggaaatagcttcatataaaagctagacagtagcattctcagaaacttctttgtgatgcttgcattcaactcacagagttgaactttcctttcgagagagaagctttgaaacactctttttccagaatctgcaagtggacatttggagggctttgaggcctgtggtggaaaaggaattatcttcccgtaaaagctagacagaagcattgtcagaaacttctttgtgatgattgcattcaactcacagagatgaaggttcctttacaaacagcagtttccaaacactctttctgtggaatctgcaagtggatatttggacctctttgaagatttcgttggaaacgggagaatcttcacagaaaagctaaacagaagcattctcagaaacttctctgtgatgtttgtgttcaactcccagagtttcacattgcttttcatagagtagttctgaaacatgcttttcgtagtgtctgcaagtggacatttggagcgctttcaggcctgtggtggaaaacgaattatggtcccataaaaactggagagaagccttctcagaaacttctctgtgatgattgcattcaactcacagagttgaaccctcctatggatagagcattgttgaaactctctttttgtggaatctgcaagtggatatgtggacctctccgaagatgtctttggaaacgggcatatcttcacataaaaactaaacagaagcattctcagaaacttcttggtgatgtttgcattcaaatcccagagttgaaccttcctttgatagttcaggtttgaaacactctttttgtaggatctgcaagtggatatttggaccactctgtggccttcgttcgaaacgggtacatcttcacataaaatctagacagatgcattctcaggaacttttggtgacgtttgtattcaactcccagagttgaactttcctttggaaagagcagctatgaaacactctttttctagaatctgcaagtggacgtttggagggctttgtggtttgtggtggaaaaggaaatatcttcacctaaatactagatggaaacattctcagaagcttctctgtgatgactgcattcaactcacggagttgaacactccttttgagagcgcagttttgaaactctgtttctgtggcatctgcaaggggacatgtagacctctttgaagatttcgttggaaacggaatcatcttcacatcaaaactatacagaagcagtctcagaatcttctttgtgatgtttgcattcaaatcccagagttgaactttcctttcaaagttcacgtttgaaacactctttttgcaggatctacaagtggatatttggaccactctgtgtccttcgttcgaaacgggtatatcttcacatgacatctagacagaagctttctcagaaaattctttgggatgattgagtggaactcacagagctgaacattccttgcgatgtagcagtttagaaacacactttctgcagaatctgcaagtgcatatttggacctctctgaggaattcgttggaaacgggataatttcagctgacaaaacagaagcattctcagaaccttcttcgtgatgtctgcattcaactcacagtgtggaacctttctttgatagttcaggtttgaaacactctttttgtagaaactgcaaggggataattgcacttctttgaggcctaccgtagtaaaggaaataacttcctatagaaagaagacagaagcattctcagaaccctcttcgtgatgtttgcattcaactcacagtgctgaacctttctttgatagttcagctttgaaacactcttcttgtagaaactgcaagtggatatttggtcctctctgaggatttcgttggaaacgggataaactgcacagaactaaacagaagaattctcagagccctcttcgtgatgtttgcattcaactcacagtgctgaacctttctttgatagtgcagctttgaaacactctttttgtagaaactgcaagtggatgtttggtcctctctgaggatttcgttggaaacgggataaaccgcacagaactaaaacagaagcattgtcagaaacttctttgtgatgattgcattcaactcacagagttgaaggttccttttcaaacagcagtttccaatcactctttctgtggaatctgcaagtggatatttgggcctctctgaggatttcgttggaaacgggataaaacgcacagaactaaaacagaagcattctcagaaacttctctgtgatgtttgtgttcaactcccagagtttcacgttgcttttcatagagtagttctgaaacatgcttttcgtagtgtctgcaagtggacatttggagcgctttcaggcctgtggtggaaaacgaattatggtcacataaaaactggagagaagccttctcagaaacttctctgtgatgattgcattcaactcacagagttgaaccctcctatggatagagcagtgttgaaactctctttttgtggaatctgcaagtggatatgtggacctctccgaagatgtctttggaaacgggaatatcttcacataaaaactaaacagaagcattctcagaaacttcttggtgatgtttgcattcaaatcccagagttgaaccttcctttgatagttcaggtttgaaacactctttctgtaggatctgcaagtggctatttggaccactctgtggccttcgttcgaaacgggtatatcttcgcataaaatctagacagaaagcattctcagaaaatactttgtgatgattgagtttaaatcacagagctgaacattcctttggatggagcaggtttgagacacactttttgtagaatctacaagtggatatttggacctctctgaggatttcgttggaaacgggataactgcacctaactaaacggaagcattctcagaaactgctttgtgatgattgcattcacctcacagagttgaacattcctattgatagagcagtttggaaacactcttgttgtggaatgtgcaagtggagatttggagcgctttgaggcctatgatagtaaagggaatagcttcatagaaaaactagacagatgcattctcaggaactttttggtgatgtttgtattcaactcccagagttgaactttcctttggaaagagcagctatgaaacactctttttctagaatctgcaagtggacgtttggagggctttgtggtttgtggtggaaaaggaaatatcttcaccgaaatactagagagaaagcattctcagaagcttctctgtgatgactgcattcaactcacggagttgaacactccttttgagagcgcagttttgaaactctctttctgtggcatccgcaaggggacatgtggacctctttgaagatttcgttggaaacggaatcatcttcacataaaaactatacagaagcagtctcagaatcttctttgtgatgtttgcattcaaatcccagagttgaactttcctttcaaagttcacttttgaaatactctttttgcaggatctacaagtggatatttggaccactctgtgtccttcgttcgaaacgggtatatcttcacatgacatctagacagaagctttctcagaaaattctttgggatgattgagtggagcaaacagagctgaacactccttgcgatgtagcagtttagaaacaccctttctgcagaatctgcaagtgcatatgtggacctctctgaggaattcgttggaaacgggataatttcagctgactaaacagaagcattctcagaaccttcttcgtgatgtctgcattcaactcacagtgtggaacctttctttgatagttcaggtttgaaacactctttttgtagaaactgcaaggggataattgcacttctttgaggcctaccgtagtaaaggaaataacttcctataaaaagaagacagaagcattctcagaaccctcttcgtgatgtttgcattcaattcacggtgctgaaactttctttgatagttcagctttgaaacactctttttgtagaaactgcaagtggatatttggtcctctctgaggatttcgttggaaacgggataaaccgcacagaactatacagaagcattctcagaaccttcttcgtgatgtttgcattcaactcacagtgttgaacctttctttgatagttcaggtttgaaacggtctttctgtagaaactgcaagtagatatttggccctctctgaggatttcgttggaaacgggataaaccgcacagaactaaaacagaagcattcacagaaaactcttggtgacgactgagtttaactcacagaactgaacattcctttggatggagcagtttcgaaacacactatttgtagaatgtgcaagtggatatgtgggcctctctgaggatttcgttggaaacgggataaaccgcacagaactaaacagaagcattctcagaaactactttgtgaagattgcattcaagtcacagagttgaacattccctttgacagagcagtttggaaactctctttgtgtagaatctgcaagtggagatatggaccgctttgaggcctatggtagtaaaggaaatagcttcatataaaagctagacagtagcattctcagaaacttctttgtgatgcttgcattcaactcacagagttgaactttcctttcgagagagaagctttgaaacactctttttccagaatctgcaagtggacatttggagggctttgaggcctgtggtggaaaaggaattatcttcccgtaaaagcctagatagaagcattgtcagaaacttctttgtgatgattgcattcaagtcacagagttgaaggttccttttcaaagagcagtttccaatcactctttctgtggaatctgcaagtggatatttggacctctttgaagatttcgttggaaacgggagaatcttcacagaaaagctaaacagaagcattctcagaaacttctctgtgatgtttgtgttcaactcccagagtttcacattgcttctcatagagtagttctgaaacatgcttttcgtagtgtctgcaagtggacatttggagcgctttcaggcctgtggtggaaaacgaattatggtcacataaaaactggagagaagccttctcagaaacttctgtgtgatgactgcattcaactcacagagttgaaccctcctatggatagagcagtgttgaaactctctttttgtggaatctgcaagtggatatgtggacctctttgaagatgtctttggaaacgggaatatcttcacataaaaactaaacagaagcattctgagaaacttcttggtgatgtttgcattcaaatcccagagttggaacttcctttgagagttcaggtttgaaacactctttttgtaggatctgcaagtggatatttggaccactctgtggccttcgttcgaaacgggtacatcttcgcataaaatctagacagaagcattctcagaaaatactttgtgatgattgagttgaactcacagagctgaacattcctttggatggagcaggtttgagacacactttttgtagaatctacaagtggatatttggacctctctgaggatttcgttggaaacgggataactgcacctaactaaacggaagcattctcagaaactgctttgtgatgattgcattcacctcacagagttgaacattcctattgatagagcagtttggaaacactcttgttgtggaatgtgcaagtggagatttggagcgctttgaggcctatggtagtaaagggaatagcttcatagaaaaactagacagatgcattctcaggaactttttggtgatgtttgtattcaactcccagagttgaactttcctttggaaagagcagctatgaaacactctttttctagaatctgcaagtggacgtttggagggctttgtggtttgtggtggaaaaggaaatatcttcacctaaatactagatagaagcattctcagaagcttctctgtgatgactgcattcaactcacggagttgaacactccttttgagagcgcagttttgaaactctccttctgtggcatccgcaaggggacatgtggacctctttgaagatttcgttggaaacggaatcatcttcacataaaaactatacagaagcagtctcagaatcttctttgtggtgtttgcattcaaatcccagagttgaactttcctttcaaagttcacgtttgaaacactctttttgcaggatctacaagtggatatttggaccactctgtgtccttcgttcgaaacgggtatatcttcacatgacatctagacagaagctttctcagaaaattctttgggatgattgagtggaactcacagagctgaacattccttgcgatgtagcagtttagaaacacactttctgcagaatctgcaagtgcatatttggacctctctgaggaattcgttggaaacgggataatttcagctgactaaacagaagcattctcagaaccttcttcgtgatgtctgcattcaactcacagtgtggaacctttctttgatagttcaggtttgaaacactctttttgtagaaactgcaaggggataattgcacttctttgaggcctaccgtagtaaaggaaataacttcctatagaaagaagacagaagcattctcagaaccctcttcgtgatgtttgcattcaactcacagtgctgaacctttctttgatagttcagctttgaaacactcttcttgtagaaactgcaagtggatatttggtcctctctgaggatttcgttggaaacgggataaaccgcacagaactaaacagaagcattctcagaaccttcttcgtgatgtttgcattcaactcacagtgttgaacctttctttgatagttcaggtttgaaacggtctttctgtagaaactgcaagtagatatttggacctctctgaggatttcgttggaaacgggataaaccgcacagaactaaaacagaagcattcacagaaaactcttggtgacgactgagtttaactcacagagctgaacattcctttggatggagcagtttcgaaacacactattagtagaatctgcaagtggatatttgggcctctctgaggatttcgttggaaacgggataaaacgcacagaactaaaacagaagcattctcagaaactactttgtgatgattgcattcaagtcacagagttgaacattccctttgacagagcagtttggaaactctctttgtgtagaatctgcaagtggagatatggaccgctttgaggcctatggtagtaaaggaaatagcttcatataaaagctagacagtagcattctcagaaacttctttgtgatgcttgcattcaactcacagagttgaactttcctttcgagagagaagctttgaaacactctttttccagaatctgcaagtggacatttggagggctttgaggcctgtggtggaaaaggaattaacttcccgtaaaagctagatagaagcattgtcagaaacttctttgtgatgattgcattcaactcacagagatgaaggttcctttacaaacagcagtttccaaacactctttctgtggaatctgcaagtggatatttggacctctttgaagatttcgttggaaacgggagaatcttcacagaaaagctaaacagaagcattctcagaaacttctctgtgatgtttgtgttcaactcccagagtttcacattgcttttcatagagtagttctgaaacatgcttttcgtagtgtctgcaagtggacatttggagcgctttcaggcctgtggtggaaaacgaattatggtcccataaaaactggagagaagccttctcagaaacttctctgttgtgattgcattcaactcacagagttgaaccctcctatggatagagcattgttgaaactctctttttgtggaatctgcaagtggatatgtggacctctccgaagatgtctttggaaacgggaatatcttcacataaaaactaaacagaagcattctcagaaacttcttggtgatgtttgcattcaaatcccagagttgaaccttcctttgatagttcaggtttgaaacactctttttgtaggatctgcaagtggatatttggaccactctgtggccttcgttcgaaacgggtacatcttcacataaaatctagacagatgcattctcaggaacttttggtgacgtttgtattcaactcccagagttgaactttcctttggaaagagcagctatgaaacactctttttctagaatctgcaagtggacgtttggagggctttgcggtttgtggtggaaaaggaaatatcttcacctaaatactagatggaagcattctcagaagcttctctgtgatgactgcattcaactcacggatttgaacactccttttgagagcgcagttttgaaactctgtttctgtggcatctgcaaggggacatgtagacctctttgaagatttcgttggaaacggaatcatcttcacataaaaactatacagaagcagtctcaagaatcttctttgtgatgtttgcattcaaatcccagagttgaactttcctttcaaagttcacgtttgaaacactctttttgcaggatctacaagtggatatttggaccactctgtgtccttcgttcgaaacgggtatatcttcacatgacatctagacagaagctttctcagaaaattctttgggatgattgagtggaactcacagagctgaacattccttgcgatgtagcagtttagaaacacactttctgcagaatctgcaagtgcatatttggacctctctgaggaattcgttggaaacgggataatttcagctgactaaacagaagcattctcagaaccttcttcgtgatgtctgcattcaactcacagtgtggaacctttctttgatagttcaggtttgaaacactctttttgtagaaactgcaaggggataattgcacttctttgaggcctaccgtagtaaaggaaataacttcctatagaaagaagacagaagcattctcagaaccctcttcgtgatgtttgcattcaactcacagtgctgaacctttctttgatagttcagctttgaaacactcttcttgtagaaactgcaagtggatatttggtcctctctgaggatttcgttggaaacgggataaaccgcacagaactaaacagaagcattctcagaaccttcttcgtgatgtttgcattcaactcacagtgttgaacctttctttgatagttcaggtttgaaacggtctttctgtagaaactgcaagtagatatttggacctctctgaggatttcgttggaaacgggataacccgcacagaactaaaacagaagcattcacagaaaactcttggtgacgactgagtttaactcacagagctgaacattcctttggatggagcagtttcgaaacacactatttgtagaatgtgcaagtggatatttgggcctctctgaggatttcgttggaaacgggataaaccgcacagaactaaacagaagcattctcagaaactactttgtgatgattgcattcaagtcacagagttgaacattccctttgacagagcagtttggaaactctctttgtgtagaatctgcaagtggagatatggaccgctttgaggcctatggtagtaaaggaaatagcttcatataaaagctagacagtagcattctcagaaacttctttgtgatgcttgcattcaactcacagagttgaactttcctttcgagagagaagctttgaaacactctttttccagaatctgcaagtggacatttggagggctttgaggcctgtggtggaaaaggaattatcttcccgtaaaagctagatagaagcattgtcagaaacttctttgtgatgattgcattcaactcacagagttgaaggttccttttcaaagagcagtttccaatcactctttgtgtggaatctgcaagtggatatttggacctattttgaagatttcgttggaaacgggagaatcttcacaggaaagctaaacagaagcattctcagaaacttctctgtgatgtttgtgttcaactcccagagtttcacattgcttttcatagagtagttctgaaacatgcttttcgtagtgtctacaagtggacatttggagcgctttcaggcctgtggtggaaaacgaattatggtcacataaaaactggagagagccttctcagaaacttctctgtgatgattgcattcaactcacagagttgaaccctcctatggatagagcagtgttgaaactctctttttgtggaatctgcaagtggatatgtggacctctccgaagatgtctttggaaacgggaatatcttcacataaaaactaaacagaagcattctcagaaacttcttggtgatgtttgcattccaatcccagagttgaaccttcctttgatagttcaggtttgaaacactctttttgtaggatctgcaagtggatatttggaccactctgtggccttcgttcgaaacgggtacatcttcgcataaaatgctagacagaagcattctcagaaaatactttgtgatgattgagtttaactcacagagctgaacattcctttggatggagcaggtttgagacacactttttgtagaatctacaagtggatatttggacctctctgaggatttcgttggaaacgcgataactgcacctaactaaacggaagcattctcagaaactgctttgtgatgattgcattcacctcacagagttgaacattcctattgatagagcagtttggaaacactcttgttgtggaatgtgcaagtggagatttggagcgctttgaggcctatggtagtaaagggaatagcttcatagaaaaactagacagatgcattctcaggaactttttggtgatgtttgtattcaactcccagagttgaactttcctttggaaagagcagctatgaaacactctttttctagaatctgcaagtggacgtttggagggctttgtggtttgtggtggaaaaggaaatatcttcacctaaatactagatagaagcattctcagaagcttctctgtgatgactgcattcaactcacggagttgaacactccttttgagagcgcagttttgaaactctctttctgtggcatctgcaaggggacatgtagacctctttgaagatttcgttggaaacggaatcatcttcacatcaaaactatacagaagcagtctcagaatcttctttgtgatgtttgcattcaaatcccagagttgaacttgcctttcaaagttcacgtttgaaacactcttttggcaggatctacaagtggatatttggaccactctgtgtccttcgttcgaaacgggtatatcttcacatgacatctagacagaagctttctcagaaaattctttgggatgattgagttgagcaaacagagctgaacactccttgcgatgtagcagtttagaaacaccctttctgcagaatctgcaagtgcatatgtggacctctctgaggaattcgttggaaacgggataatttcagctgactaaacagaagcattctcagaaccttcttcgtgatgtctgcattcaactcacagtgtggaacctttctttgatagttcaggtttgaaacactctttttgtagaaactgcaaggggatcattgcacttctttgaggcctaccgtagtaaaggaaataacttcctataaaaagaagacagaagcattctcagaaccctcttcgtgatgtttgcattcaactcacggtgctgaacctttctttgatagttcagctttgaaacactctttttgtagaaactgcaagtggatatttggtcctctctgaggatttcgttggaaacgggataaaccgcacagaactaaacagaagcattctcagaaccttcttcgtgatgtttgcattcaactcacagtgttgaacctttctttgatagttcaggttggaaacggtctttctgtagaaactgcaagtagatatttggacctctctgaggatttcgttggaaacgggataaaccgcacagaactaaaacagaagcattcacagaaaactcttggtgacgacagagtttaactcacagagctgaacattcctttggatggagcagtttcgaaacacactatttgtagaatgtgcaagtggatatttgggcctctctgaggatttcgttggaaatgggatataccgcacagaactaaacagaagcattctcagaaactactttgtgatgattgcattcaagtcacagagttgaacattccctttgacagagcagtttggaaactctctttgtgtagaatctgcaagtggagatatggaccgctttgaggcctatggtagtaaaggaaatagcttcatataaaagctagacagtagcattctcagaaacttctttgtgatgcttgcattcaactcacagagttgaactttcctttcgagagagaagctttgaaacactctttttccagaatctgcaagtggacatttggagggctttgaggcctgtggtggaaaaggaattatcttcccgtaaaagctagatagaagcattgtcagaaacttctttgtgatgattgcattcaactcacagagttgaaggttccttttcaaagagcagtttccaatcactctttctgtggaatctgcaagtggatatttggacctattttgaagatttcgttggaaacgggagaatcttcacaggaaagctaaacagaagcattctcagaaacttctctgtgatgtttgtgttcaactcccagagtttcacattgcttttcatagagtagttctgaaacatgcttttcgtagtgtctacaagtggacatttggagcgctttcaggcctgtggtggaaaacgaattatggtcacataaaaactggagagaagccttctcagaaacttctctgtgatgattgcattcaactcacagagttgaaccctcctatggatagagcagtgttgaaactctctttttgtggaatctgcaagtggatatgtggacctctccgaagatgtctttggaaacgggaatatcttcacataaaaacttaacagaagcattctcagaaacttcttggtgatgtttgcattcaaatcccagagttgaaccttcctttgatagttcaggtttgaaacactctttttgtaggatctgcaagtggatatttggaccactctgtggccttcgttcgaaacgggtatatcttcgcataaaatctagacagaagcattctcagaaaatactttgtgatgattgagtttaactcacagagctgaacattcctttggatggagcaggtttgagacacaccttttgtagaatctacaagtggatatttggacctctctgaggatttcgttggaaacgggataactgcacctaactaaacggaagcattctcagaaactgctttgtgatgattgcattcacctcacagagttgaacattcctattgatagagcagtttggaaacactcttgttgtggaatgtgcaagtggagatttggagcgctttgaggcctatggtagtaaagggaatagcttcatagaaaaactagacagatgcattctcaggaactttttggtgatgtttgtattcaactcccagagttgaactttcctttggaaagagcagctatgaaacactgtttttctagaatctgcaagtggacgtttggagggctttgtggtttgtggtggaaaaggaaatatcttcacctaaatactagatagaagcatcctcagaagcttctctgtgatgactgcattcaactcacggagttgaacactccttttgagagcgcagttttgaaactctctttctgtggcatctgcaaggggacatgtagacctctttgaagatttcgttggaaacggaatcatcttcacataaaaactacacagaagcagtctcagaatcttctttgtgatgtttgcattcaaatccccgagttgaactttcctttcaaagttcacgtttgaaacactctttttgcaggatctacaagtggatatttggaccactctgtgtccttcgttcgaaacgggtatatcttcacatgacatctagacagaagctttctcagaaaattctttgggatgattgagttgaactcacagagctgagcattccttgcgatgtagcagtttagaaacacactttctgcagaatctgcaagtgcatatttggacctctgtgaggaattcgttggaaacgggataatttcagctgactaaacagaagcattctcagaaccttcttcgtgatgtctgcattcaactcacagtgtggaacctttctttgatagttcaggtttgaaacactctttctgtagaaactgcaaggggataattgcactctttgaggagtaccgtagtaaaggaaataacttcctataaaaagaagacagaagcattctcagaaccctcttcgtgatgtttgcattcaactcacagtgctgaacctttctttgatagttcagctttgaaacactctttttgtagaaactgcgagtggatatttggtcctctctgaggatttcgttggaaacgggataaactgcacagaactaaacagaagcattctcagaaccttcttcgtgatgtttgcattcaactcacagtgttgaacctttctttgatagttcaggtttgaaacggtctttctgtagaaactgcaagtagatatttggacctctctgaggatttcgttggaaacgggataacccgcacagaactaaaacagaagcattcacagaaaactcttggtgacgactgagtttaactcacagagctgaacattcctttggatggagcagtttcgaaacacactatttgtagaatgtgcaagtggatatttaggcctctctgaggatttcgttggaaacgggataaaccgcacagaactaaacagaagcattctcagaaactactttgtgatgattgcattcaagtcacagagttgaacattccctttgacagagcagtttggaaactctctttgtgtagaatctgcaagtggagatatggaccgctttgaggcctatggtagtaaaggaaatagcttcatataaaagctagacagtagcattctcagaaacttctttgtgatgcttgcattcaactcacagagttgaactttcctttcgagagagaagctttgaaacactctttttccagaatctgcaagtggacatttggagggctttgaggcctgtggtggaaaaggaattatcttcccgtaaaagctagatagaagcattgtcagaaacttctttgtgatgattgcattcaactcacagagttgaaggttccttttcaaagagcagtttccaatcactctttgtgtggaatctgcaagtggatatttggacctattttgaagatttcgttggaaacgggagaatcttcacaggaaagctaaacagaagcattctcagaaacttctctgtgatgtttgtgttcaactcccagagtttcacattgcttttcatagagtagttctgaaacatgcttttcgtagtgtctacaagtggacatttggagcgctttcaggcctgtggtggaaaacgaattatggtcacataaaaactggagagaagccttctcagaaacttctctgtgatgattgcattcaactcacagagttgaaccctcctatggatagagcagtgttgaaactctctttttgtggaatctgcaagtggatatgtggacctctccgaagatgtctttggaaacgggaatatcttcacataaaaactaaacagaagcattctcagaaacttcttggtgatgtttgcattcaaatcccagagttgaaccttcctttgatagttcaggtttgaaacactctttttgtaggatctgcaagtggatatttggaccactctgtggccttcgtttgaaacgggtatatcttcgcataaaatctagacagaagcattctcagaaaatactttgtgatgattgagtttaactcacagagctgaacattcctttggatggagcaggtttgagacacactttttgtagaatctacaagtggatatttggacctctctgaggatttcgttggaaacgggataactgcacctaactaaacggaagcattctcagaaactgctttgtgatgattgcattcacctcacagagttgaacattcctattgatagagcagtttggaaacactcttgttgtggaatgtgcaagtggagatttggagcgctttgaggcctatggtagtaaagggaatagcttcatagaaaaactagacagatgcattctcaggaactttttggtgatgtttgtattcaactcccagagttgaactttcctttggaaagagcagctatgaaacactctttttctagaatctgcaagtggacgtttggagggctttgtggtttgtggtggaaaaggaaatatcttcacctaaatactagatagaagcattctcagaagcttctctgtgatgactgcattcaactcacggagttgaacactccttttgagagcgcagttttgaaactctctttctgtggcatctgcaaggggacatgtagacctctttgaagatttcgttggaaacggaatcatcttcacataaaaactatacagaagcagtctcagaatcttctttgtgatgtttgcattcaaatcccagagttgaactttcctttcaaagttcacgtttgaaacactctttttgcaggatctacaagtggatatttggaccactctgtgtccttcgttcgaaacgggtatatcttcacacgacatctagacagaagctttctcagaaaattctttgggatgattgagtggaactcacagagctgaacattccttgcgatgtagcagtttagaaacacactttctgcagaatctgcaagtgcatatttggacctctctgaggaattcgttggaaatgggataatttcagctgactaaacagaagcattctcagaaccttcttcgtgatgtctgcattcaactcacagtgtggaacctttctttgatagttcaggtttgaaacactctttttgtagaaactgcaaggggataattgcacttctttgaggcctaccgtagtaaaggaaataacttcctatagaaagaagacagaagcattctcagaaccctcttcgtgatgtttgcattcaactcacagtgctgaacctttctttgatagttcagctttgaaacactcttcttgtagaaactgcaagtggatatttggtcctctctgaggatttcgttggaaacgggataaaccgcacagaactaaacagaagcattctcagaaccttcttcgtgatgtttgcattcaactcacagtgttgaacctttctttgatagttcaggtttgaaacggtctttctgtagaaactgcaagtagatatttggacctctctgaggatttcgttggaaacgggataaaccgcacagaactaaaacagaagcattcacagaaaactcttggtgacgactgagtttaactcacagagctgaacattcctttggatggagcagtttcgaaacacagtatttgtagaatgtgcaagtggatatgtgggcctctctgaggatttcgttggaaacgggataaaccgcacagaactaaacagaagcattctcagaaactactttgtgatgattgcattcaagtcacagagttgaacattccctttgacagagcagtttggaaactctctttgtgtagaatctgcaagtggagatatggaccgctttgaggcctatggtagtaaaggaaatagcttcatataaaagctagacagtagcattctcagaaacttctttgtgatgcttgcattcaactcacagagttgaactttcctttcgagagagaagctttgaaacactctttttccagaatctgcaagtggacatttggagggctttgaggcctgtggtggaaaaggaattatcttcccgtaaaagctagatagaagcattgtcagaaacttctttgtgatgattgcattcaactcacagagttgaaggttccttttcaaacagcagtttccaatcactctttctgtggaatctgcaagtggatatttggacctattttgaagatttcgttggaaacgggagaatcttcacagaaaagctaaacagaagcattctcagaaacttctctgtgatgtttgtgttcatctcccagagtttcacgttgcttttcatagagtagttctgaaacatgcttttcgtagtgtctgcaagtggacatttggagcgctttcaggcctgtggtggaaaacgaattagggtcacataaaaactggagagaagccttctcagaaacttctctgtgatgattgcattcaactcacagagttgaaccctcctatggatagagcagtgttgaaactgtctttttgtggaatctgcaagtggatatgtggccctctccgaagatgtctttggaaacgggaatatcttcacataaaaactaaacagaagcattctcagaaacttcttggtgatgtttgcattcaaatcccagagttgaaccttcctttgatagttcaggtttgaaacactctttttgtaggatctgcaagtggatatttggaccactctgtggccttcgttcgaaacgggtatatcttcgcataaaatctagacagaagcattctcagaatatactttgtgatgattgagtttaactcacagagctgaacattcctttggatggagcaggtttgagacacactttttgtagaatctacaagtggatatttggacctctctgaggatttcgttggaaacgggataactgcacctaactaaacggaagcattctcagaaactgctttgtgatgattgcattcacctcacagagttgaacattcctattgatagagcagtttggaaacactcttgttgtggaatgtgcaagtggagatttggagcgctttgaggcctatggtagtaaagggaatagcttcatagaaaaactagacagatgcattctcaggaactttttggtgatgtttgtattcaactcccagagttgaactttcctttggaaagagcagctatgaaacactctttttctagaatctgcaagtggacgtttggagggctttgtggtttgtggtggaaaaggaaatatcttcacctaaatactagatagaagcatcctcagaagcttctctgtgatgactgcattcaactcacggagttgaacactccttttgagagcgcagttttgaaactctctttctgtggcatctgcaaggggacatgtagacctctttgaagatttcgttggaaacggaatcatcttcacataaaaactatacagaagcagtctcagaatcttctttgtgatgtttgcattcaaatccccgagttgaactttcctttcaaagttcacgtttgaaacactctttttgcaggttctacaagtggatatttggaccactctgtgtccttcgttccaaacgggtatatcttcacatgacatctagacagaagctttctcagaaaattctttgggatgattgagttgaactcacagagctgagcattccttgcgatgtagcagtttagaaacacactttctgcagaatctgcaagtgcatatttggacctctgtgaggaattcgttggaaacgggataatttcagctgactaaacagaagcattctcagaaccctcttcgtgatgtttgcattcaactcacagtgctgaacctttctttgatagttcagctttgaaacactctttctgtagaaactgcaaggggataattgcactctttgaggagtaccgtagtaaaggaaataacttcctataaaaagaagacagaagcattctcagaaccctcttcgtgatgtttgcattcaactcacagtgctgaacctttctttgatagttcagctttgaaacactctttttgtagaaactgcaagtggatatttggtcctctctgaggatttcgttggaaacgggataaaccgcacagaactaaacagaagcattcacagaaaactcttggtgacgactgagtttaactcacagagctgaacattcctttggatggagcagtttcgaaacacactatttgtagaatctgcaagtggatatgggggcctctctgaggatttcgttggaaacagggtaaaccgcacagaactaaaacagaagcattcacagaaaactcttggtgacgactgagtttaactcacagagctgaacattcctttggatggagcagtttcgaaacacactatttgtagaatgtgcaagtggatatttgggcctctctgaggatttcgttggaaacgggataaaccgcacagaactaaacagaagcattctcagaaactactttgtgatgattgcattcaagtcacagagttgaacattccctttgacagagcagtttggaaactctctttgtgtagaatctgcaagtggagatatggaccgctttgaggcctatggtagtaaaggaaatagcttcatataaaagctagacagtagcattctcagaaacttctttgtgatgcttgcattcaactcacagagttgaactttcctttcgagagagaagctttgaaacactctttttccagaatctgcaagtggacatttggagggctttgaggcctgtggtggaaaaggaattatcttcccgtaaaagctagatagaagcattgtcagaaacttctttgtgatgattgcattcaactcacagagttgaaggttccttttcaaagagcagtttccaatcactctttctgtggaatctgcaagtggatatttggacctattttgaagatttcgttggaaacgggagaatcttcacaggaaagctaaacagaagcattctcagaaacttctctgtgatgtttgtgttcaactcccagagtttcacattgcttttcatagagtagttctgaaacatgcttttcgtagtgtctacaagtggacatttggagcgctttcaggcctgtggtggaaaacgaattatggtcacataaaaactggagagaagccttctcagaaacttctctgtgatgattgcattcaactcacagagttgaaccctcctatggatagagcagtgttgaaactctctttttgtggaatctgcaagtggatatgtggacctctccgaagatgtctttggaaacgggaatatcttcacataaaaactaaacagaagcattctcagaaacttcttggtgatgtttgcattcaaatcccagagttgaaccttcctttgagagttcaggtttgaaacactctttttgtaggatctgcaagtggatatttggaccactctgtggccttcgttcgaaacgggtacatcttcgcataaaatctagacagaagcattctcagaaaatactttgtgatgattgagttgaactcacagagctgaacattcctttggatggagcaggtttgagacacactttttgtagaatctacaagtggatatttggacctctctgaggatttcgttggaaacgggataactgcacctaactaaacggaagcattctcagaaactgctttgtgatgattgcattcacctcacagagttgaacattcctattgatagagcagtttggaaacactcttgttgtggaatgtgcaagtggagatttggagcgctttgaggcctatggtagtaaagggaatagcttcatagaaaaactagacagatgcattctcaggaactttttggtgatgtttgtattcaactcccagagttgaactttcctttggaaagagcagctatgaaacactctttttctagaatctgcaagtggacgtttggagggctttgtggtttgtggtggaaaaggaaatatcttcagctaaatactagagagaagcattctcagaagcttctctgtgatgactgcattcaactcacggagttgaacactccttttgagagcgcagttttgaaactctctttctgtggcatctgcaaggggacatgtagacctctttgaagatttcgttggaaacggaatcatcttcacatagaaactatacagaagcagtctcagaatcttctttgtgatgtttgcattcaaatccccgagttgaactttcctttcaaagttcacgtttgaaacactctttttgcaggatctacaagtggatatttggaccactactgtgtccttcgttcgaaacgggtatatcttcacatgacatctagacagaagctttctcagaaaattctttgggatgattgagtggaactcacagagctgaacattccttgcgatgtagcagtttagaaacacactttctgcagaatctgcaagtgcatatttggacctctctgaggaattcgttggaaacgggataatttcagctgactaaacagaagcattctcagaaccttcttcgtgatgtctgcattcaactcacagtgtggaacctttctttgatagttcaggtttgaaacactctttttgtagaaactgcaaggggataattgcacttctttgaggcctaccgtagtaaaggaaataacttcctatagaaagaagacagaagcattctcagaaccctcttcgtgatgtttgcattcaactcacagtgctgaacctttctttgatagttcagctttgaaacactcttcttgtagaaactgcaagtggatatttggtcctctctgaggatttcgttggaaacgggataaaccgcacagaactaaacagaagaattctcagagccctcttcgtgatgtttgcattcaactcacagtgctgaacctttctttgatagtgcagctttgaaacactctttttgtagaaactgcaagtggatgtttggtcctctctgaggatttcgttggaaacgggataaaccgcacagaactaaaacagaagcattgtcagaaacttctttgtgatgattgcattcaactcacagagttgaaggttccttttcaaacagcagtttccaatcactctttctgtggaatctgcaagtggatatttgggcctctctgaggatttcgttggaaacgggataaaacgcacagaactaaaacagaagcattctcagaaacttctctgtgatgtttgtgttcaactcccagagtttcacgttgcttttcatagagtagttctgaaacatgcttttcgtagtgtctgcaagtggacatttggagcgctttcaggcctgtggtggaaaacgaattatggtcacataaaaactggagagaagccttctcagaaacttctctgtgatgattgcattcaactcacagagttgaaccctcctatggatagagcagtgttgaaactctctttttgtggaatctgcaagtggatatgtggacctctccgaagatgtctttggaaacgggaatatcttcacataaaaactaaacagaagcattctcagaaacttcttggtgatgtttgcattcaaatcccagagttgaaccttcctttgatagttcaggtttgaaacactctttctgtaggatctgcaagtggctatttggaccactctgtggccttcgttcgaaacgggtatatcttcgcataaaatctagacagaagcattctcagaaaatactttgtgatgattgagtttaaatcacagagctgaccattcctttggatggagcaggtttgagacacactttttgtagaatctacaagtggatatttggacctctctgaggatttcgttggaaacgggataactgcacctaactaaacggaagcattctcagaaactgctttgtgatgattgcattcacctcacagagttgaacattcctattgatagagcagtttggaaacactcttgttgtggaatgtgcaagtggagatttggagcgctttgaggcctatggtagtaaagggaatagcttcatagaaaaactagacagatgcattctcaggaactttttggtgatgtttgtattcaactcccagagttgaactttcctttggaaagagcagctatgaaacactctttttctagaatctgcaagtggacgtttggagggctttgtggtttgtggtggaaaaggaaatatcttcacctaaatactagatagaagcattctcagaagcttctctgtgatgactgcattcaactcacggagttgaacactccttttgagagcgcagttttgaaactctctttctgtggcatctgcaaggggacatgtagacctctttgaagatttcgttggaaacggaatcatcttcacataaaaactatacagaagcagtctcagaatcttctttgtgatgtttgcattcaaatcccagagttgaactttcctttcaaagttcacgtttgaaacactctttttgcaggatctacaagtggatatttggaccactctgtgtccttcgttcgaaacgggtatatcttcacacgacatctagacagaagctttctcagaaaattctttgggatgattgagtggaactcacagagctgaacattccttgcgatgtagcagtttagaaacacactttctgcagaatctgcaagtgcatatttggacctctctgaggaattcgttggaaacgggataatttcagctgactaaacagaagcattctcagaaccttcttcgtgatgtctgcattcaactcacagtgtggaacctttctttgatagttcaggtttgaaacactctttttgtagaaactgcaaggggataattgcacttctttgaggcctaccgtagtaaaggaaataacttcctatagaaagaagacagaagcattctcagaaccctcttcgtgatgtttgcattcaactcacagtgctgaacctttctttgatagttcagctttgaaacactcttcttgtagaaactgcaagtggatatttggtcctctctgaggatttcgttggaaacgggataaaccgcacagaactaaacagaagaattctcagagccctcttcgtggtgtttgcattcaactcacagtgctgaacctttctttgatagtgcagctttgaaacactatttttgtagaaactgcaagttgatatttggtcctctctgaggatttcgttggaaacgggataaaccgcacagaactaaaacagaagcattcacagaaaactcttggtgacgactgagtttaactcacagagctgaacattcctttggatggagcagtttcgaaacacactatttgtagaatctgcaagtggatatttgggcctctctgaggatttcgttggaaacgggataaaacgcacagaactaaaacagaagcattctcagaaactactttgtgatgattgcattcaagtcacagagttgaacattccctttgacagagcagtttggaaactctctttgtgtagaatctgcaagtggagatatggaccgctttgaggcctatggtagtaaaggaaatagcttcatataaaagctagacagtagcattctcagaaacttctttgtgatgcttgcattcaactcacagagttgaactttcctttcgagagagaagctttgaaacactctttttccagaatgtgcaagtggacatttggggagctttgaggcctgtggtggaaaaggaattatcttcccgtaaaagctagatagaagcattgtcagaaacttctttgtgatgattgcattcaactcacagagttgaaggttccttttcaaacagcagtttccaatcactctttctgtggaatctgcaagtggatatttcgacctctttgaagatttcgttggaaacgggagaatcttcacagaaaagctaaacagaagcattctcagaaacttctctgtgatgtttgttttcaactcccagagtttcacgttgcttttcatagagtagttctgaaacatgcttttcgtagtgtctgcaagtggacatttggagcgctttcaggcctgtggtggaaaacgaattatggtcacataaaaactggagagaagccttctcagaaacttctctgtgatgattgcattcaactcacagatttgaaccctcctatggatagagcagtgttgaaactctctttttgtggaatctgcaagtggatatgtggacctctccgaagatgtctttggaaacgggaatatcttcacataaaaactaaacagaagcattctcagaaacttcttggtgatgtttgcattcaaatcccagagttgaaccttcctttgatagttcaggtttgaaacactctttctgtaggatctgcaagtggctatttggaccactctgtggccttcgttcgaaacgggtatatcttcgcataaaatctagacagaagcattctcagaaaatactttgtgatgattgagtttaactcacagagctgaacattcctttggatggagcaggtttgagacacaccttttgtagaatctacaagtggatatttggacctctctgaggatttcgttggaaacgggataactgcacctaactaaacggaagcattctcagaaactgctttgtgatgattgcattcacctcacagagttgaacattcctattgatagagcagtttggaaacactcttgttgtggaatgtgcaagtggagatttggagcgctttgaggcctatggtagtaaagggaatagcttcatagaaaaactagacagatgcattctcaggaactttttggtgatgtttgtattcaactcccagagttgaactttcctttggaaagagcagctatgaaacactctttttctagaatctgcaagtggacgtttggagggctttgtggtttgtggtggaaaaggaaatatcttcacctaaatactagatagaagcattctcagaagcttctctgtgatgactgcattcaactcacggagttgaacactccttttgagagcgcagttttgaaactctctttctgtggcatctgcaaggggacatgtagacctctttgaagatttctttggaaacggaatcatcttcacataaaaactatacagaagcagtctcagaatcttctttgtgatgtttgcattcaaatcccagagttgaactttcctttcaaagttcacgtttgaaacactctttttgcaggatctacaactggatatttggaccactctgtgtccttcgttcgaaacgggtatatcttcacatgacatctaggcagaagctttctcagaaaattctttgggatgattgagttgaactcacagagctgaacattccttgcgatggagcagtttagaaacacactttctgcagaatctgcaagtgcatatttggacctctctgaggaattcgttggaaacgtgataatttcagctgactaaacagaagcattctcagaaccttcttcgtgatgtctgcattcaactcacagtgtggaacctttctttgatagttcaggtttgaaacactctttttgtggaaactgcaaggggataattgcacttctttgaggcctaccgtagtaaaggaaataacttcctataaaaagaagacagaagcattctcagaaccctcttcgtgatgattgcattcaacacacagtgctgaacctttctttgatagttcagctttgaaacactctttttgtagaaattgcaactggatatttggtcctctctgaggatttcgttggaaacgggataaaccgcacagaactaaacagaagcattcacagaaaactcttggtgacgactgagtttaactcacagagctgaacattcctttggatggagcagtttcgaaacacactctttgtagaatctgcaagtggatatttgggcctctctgaggatttcgttggaaatgggataaaccgcacagaactaaaacagaagcattctcagaaactactttgtgatgattgcattcaagtcacagagttgaacattccctttgacagagcagtttggaaactctctttgtgtagaatctgcaagtggagatatggaccgctttgaggcctatggtagtaaaggaaatagcttcatataaaagctagacagtagcattctcagaaacttctttgtgatgcttgcattcaactcacagagttgaactttcctttcgagagagaagctttgaaacactctttttccagaatctgcaagtggacatttggagggctttgaggcctgtggtggaaaaggaattatcttcccgtaaaagctagatagaagcattgtcagaaacttctttgtgatgattgcattcaactcacagagttgaaggttccttttcaaagagcagtttccaatcactctttctgtggaatctgcaagtggatatttggacctattttgaagatttcgttggaaacgggagaatcttcacaggaaagctaaacagaagcattctcagaaacttctctgtgatgtttgtgttcaactcccagagtttcacattgcttttcatagagtagttctgaaacatgcttttcgtagtgtctacaagtggacatttggagcgctttcaggcctgtggtggaaaacgaattatggtcacataaaaactggagagaagccttctcagaaacttctctgtgatgattgcattcaactcacagagttgaaccctcctatggatagagcagtgttgaaactctctttttgtggaatctgcaagtggatatgtggacctctccgaagatgtctttggaaacgggaatatcttcacataaaaactaaacagaagcattctcagaaacttcttggtgatgtttgcattgaaatcccagagttgaaccttcctttgatagttcaggtttgaaacactctttttgtaggatctgcaagtggatatttggaccactctgtggccttcgttcgaaacggctatatcttcgcataaaatctagacagaagcattctcagaaaatactttgtgatgattgagtttaactcacagagctgaacattcctttggatggagcaggtttgagacacactttttgtagaatctacaagtggatatttggacctctctgaggatttcgttggaaacgggataactgcacctaactaaacggaagcattctcaaaaactgctttgtgatgattgcattcacctcacagagttgaacattcctattgatagagcagtttggaaacactcttgttgtggaatgtgcaagtggagatttggagcgctttgaggcctaaggtagtaaagggaatagcttcatagaaaaactagacagatgcattctcaggaactttttggtgatgtttgtattcaactcccagagttgaactttcctttggaaagagcagctatgaaacactgtttttctagaatctgcaagtggacgtttggagggctttgtggtttgtggtggaaaaggaaatatcttcacctaaatactagatagaagcatcctcagaagcttctctgtgattactgcattcaactcacggagttgaacactccttttgagagcgcagttttgaaactctctttctgtggcatctgcaaggggacatgtagacctctttgaagatttcgttcgaaacggaatcatcttcacataaaaactacacagaagcagtctcagaatcttctttgtgatgtttgcattcaaatccccgagttgaactttcctttcaaagttcacgtttgaaacactctttttgcaggatctacaagtggatatttggaccactctgtgtccttcgatcgaaacgggtatatcttcacatgacatctagacagaagctttctcagaaaattctttgggatgattgagttgaactcacagagctgagcattccttgcgatgtagcagtttagaaacacactttctgcagaatctgcaagtgcatatttggacctctgtgaggaattcgttggaaacgggataatttcagctgactaaacagaagcattctcagaaccttcttcgtgatgtctgcattcaactcacagtgtggaacctttctttgatagttcaggtttgaaacactctttttgtagaaactgcaaggggataattgcactctttgaggagtaccgtagtaaaggaaataacttcctataaaaagaagacagaagcattctcagaaccctcttcgtgatgtttgcattcaactcacagtgctgaacctttctttgatagttcagctttgaaacactctttttgtagaaactgcaagtggatatttggtcctctctgaggaattcgttggaaacgggataaactgcacagaactaaacagaagcattctcagaaccttcttcgtgatgtttgcattcaactcacagtgttgaacctttctttgatagttcaggtttgaaacggtctttctgtagaaactgcaagtagatatttggacctctctgaggatttcgttggaaacgggataacccgcacagaactaaaacagaagcattcacagaaaactcttggtgacgactgagtttaactcacagagctgaacattcctttggatggagcagtttcgaaacacactatttgtagaatctgcaagtggatatttgggactctctgaggatttcgttggaaacgggataaaccgcacagaactaaacagaagcattctcagaaactactttgtgatgattgcattcaagtcacagagttgaacattccctttgatggagcagtttggaaactctctttgtgtagaatctgcaagtggagatatggaccgctttgaggcctatggtagtaaaggaaatagcttcatataaaagctagacagtagcattctcagaaacttctttgtgatgcttgcattcaactcacagatgttgaactttcctttcgagagagaagctttgaaacactctttttccagaatctgcaagtggacatttggagggctttgaggcctgtggtggaaaaggaattatcttcccgtaaaagctagatagaagcattgtcagaaacttctttgtgatgattgcatacaagtcacagagttgaaggttccttttcaaagagcagtttccaatcactctttctgtggaatctgcaagtggatatttggacctctttgaagatttcgttggaaacgggagaatcttcacagaaaagctaaacagaagcattctcagaaacttctctgtgatgtttgtgttcaactcccagagtgtcacattgcttctcatagagtagttctgaaacatgcttttcgtagtgtctgcaaggggacatttggagcgctttcaggcctgtggtggaaaacgaattatggtcacataaaaactgaacagaagccttctcagaaacttctctgtgatgattgcattcaactcacagagttgaaccctcctatggatagagcagtgttgaaactctctttttgtggaatctgcaagcggatatgtggacctctccgaagatgtctttggaaacgggaatatcttcacataaaaactaaacagaagcattctcagaaacttcttggtgatgtttgcattcaaatcccagagttgaaccttcctttgagagttcaggtttgaaacactctttttgtaggatctgcaagtggatatttggaccactctgtggccttcgttcgaaacgggtacatcttcgcataaaatctagacagaagcattctcagaaaatactttgtgatgattgagttaaaatcacagagctgaacattcctttggatggagcaggtttgagacacactttttgtagaatctacaagtggatatttggacctctctgaggatttcgttggaaacgggataactgcacctaactaaacggaagcattctcagaaactgctttgtgatgattgcattcacctcacagagttgaacattcctattgatagagcagtttggaaacactcttgttgtggaatgtgcaagtggagatttggagcgctttgaggcctatggtagtaaagggaatagcttcatagaaaaactagacagatgaattctcaggaactttttggtgatgtttgtattcaactcccagagttgaactttcctttggaaagagcagctatgaaacactctttttctagaatctgcaagtggacgtttggagggctttgtggtttgtggtggaaaaggaaatatcttcacctaaatactagagagaagcattctcagaagcttctctgtgatgactgcattcaactcacggagttgaacactccttttgggagcgcagttttgaaactctctttctgtggcatccgcaaggggacatgtggacctctttgaagatttcgttggaaacggaatcatcttcacataaaaactatacagaagcagtctcagaatcttctttgtgatgtttgcattcaaatcccagagttgaactttcctttcaaagttcacgtttgaaacactctttttgcaggatctacaagtggatatttggaccactctgtgtccttcgttcgaaacgggtatatcttcacaggacatctagacagaagctttctcagaaaattctttgggatgattgagtggaactcacagagctgaacattccttgcgatgtagcagtttagaaacacactttctgcagaatctgcaagtgcatatttggacctctctgaggaattcgttggaaacgggataatttcagctgactaaacagaagcattctcagaaccttcttcgtgatgtctgcattcaactcacagtgtggaacctttctttgatagttcaggtttgaaacactctttttgtagaaactgcaaggggataattgcacttctttgaggcctaccgtagtaaaggaaataacttcctatagaaagaagacagaagcattctcagaaccctcttcgtgatgtttgcattcaactcacagtgctgaacctttctttgatagttcagctttgaaacactcttcttgtagaaactgcaagtggatatttggtcctctctgaggatttcgttggaaacgggataaaccgcacagaactaaacagaagaattctcagagccctcttcgtgatgtttgcattcaactcacagtgctgaacctttctttgatagtgcagctttgaaacactctttttgtagaaactgcaagtggatgtttggtcctctctgaggatttcgttggaaacgggataaaccgcacagaactaaaacagaagcattgtcagaaacttctttgtgatgattgcattcaactcacagagttgaaggttccttttcaaacagcagtttccaatcactctttctgtggaatctgcaagtggatatttgggcctctctgaggatttcgttggaaacgggataaaacgcacagaactaaaacagaagcattctcagaaacttctctgtgatgtttgtgttcaactcccagagtttcacgttgcttttcatagagtagttctgaaacatgcttttcgtagtgtctgcaagtggacatttggagcgctttcaggcctgtggtggaaaacgaattatggtcacataaaaactggagagaagccttctcagaaacttctctgtgatgattgcattcaactcacagagttgaaccctcctatggatagagcagtgttgaaactctctttttgtggaatctgcaagtggatatgtggacctctccgaagatgtctttggaaacgggaatatcttcacataaaaactaaacagaagcattctcagaaacttcttggtgatgtttgcattcaaatcccagagttgaaccttcctttgatagttcaggtttgaaacactctttctgtaggatctgcaagtggctatttggaccactctgtggccttcgttcgaaacgggtatatcttcgcataaaatctagacagaagcattctcagaaaatactttgtgatgattgagtttaaatcacagagctgaccattcctttggatggagcaggtttgagacacactttttgtagaatctacaagtggatatttggacctctctgaggatttcgttggaaacgggataactgcacctaactaaacggaagcattctcagaaactgctttgtgatgattgcattcacctcacagagttgaacattcctattgatagagcagtttggaaacactcttgttgtggaatgtgcaagtggagatttggagcgctttgaggcctatggtagtaaagggaatagcttcatagaaaaactagacagatgcattctcaggaactttttggtgatgtttgtattcaactcccagagttgaactttcctttggaaagagcagctatgaaacactctttttctagaatctgcaagtggacgtttggagggctttgtggtttgtggtggaaaaggaaatatcttcacctaaatactagacagaagcattctcagaagcttctctgtgatgactgcattcaactcacggagttgaacactccttttgagagcgcagttttgaaactctctttctgtggcatctgcaaggggacatgtagacctctttgaagatttcgttggaaacggaatcatcttcacataaaaactatacagaagcagtctcagaatcttctttgtgatgtttgcattcaaatcccagagttgaactttcctttcaaagttcacgtttgaaacactctttttgcaggatctacaagtggatatttggaccactctgtgtccttcgttcgaaacgggtatatcttcacacgacatctagacagaagctttctcagaaaattctttgggatgattgagtggaactcacagagctgaacattccttgcgatgtagcagtttagaaacacactttctgcagaatctgcaagtgcatatttggacctctctgaggaattcgttggaaacgggataatttcagctgactaaacagaagcattctcagaaccttcttcgtgatgtctgcattcaactcacagtgtggaacctttctttgatagttcaggtttgaaacactctttttgtagaaactgcaaggggataattgcacttctttgaggcctaccgtagtaaaggaaataacttcctatagaaagaagacagaagaattctcagagccctcttcgtgatgtttgcattcaactcacagtgctgaacctttctttgatagtgcagctttgaaacactcttcttgtagaaactgcaagtggatatttggtcctctctgaggatttcgttggaaacgggataaaccgcacagaactaaacagaagcattgtcagaaacttctttgtgatgattgcattcaactcacagagttgaaggttccttttcaaacagcagtttccaatcactctttctgtggaatctgcaagtggatatttgggcctctctgaggatttcgttggaaacgggataaaacgcacagaactaaaacagaagcattctcagaaacttctctgtgatgtttgtgttcaactcccagagtttcacgttgcttttcatagagtagttctgaaacatgcttttcgtagtgtctgcaagtggacatttggagcgctttcaggcctgtggtggaaaacgaattatggtcacataaaaactggagagaagccttctcagaaacttctctgtgatgattgcattcaactcacagagttgaaccctcctatggatagagcagtgttgaaactctctttttgtggaatctgcaagtggatatgtggacctctccgaagatgtctttggaaacgggaatatcttcacataaaaactaaacagaagcattctcagaaacttcttggtgatgtttgcattcaaatcccagagttgaaccttcctttgatagttcaggtttgaaacactctttctgtaggatctgcaagtggctatttggaccactctgtggccttcgttcgaaacgggtatatcttcgcataaaatctagacagaagcattctcagaaaatactttgtgatgattgagtttaaatcacagagctgaccattcctttggatggagcaggtttgagacacactttttgtagaatctacaagtggatatttggacctctctgaggatttcgttggaaacgggataactgcacctaactaaacggaagcattctcagaaactgctttgtgatgattgcattcacctcacagagttgaacattcctattgatagagcagtttggaaacactcttgttgtggaatgtgcaagtggagatttggagcgctttgaggtctatggtagtaaagggaatagcttcatagaaaaactagacagaatgcattctcaggaactttttggtgatgtttgtattcaactcccagagttgaactttcctttggaaagagcagctatgaaacactctttttctagaatctgcaagtggacgtttggagggctttgtggtttgtggtggaaaaggaaatatcttcacctaaatactagatagaagcattctcagaagcttctctgtgatgactgcattcaactcacggagttgaacactccttttgagagcgcagttttgaaactctctttctgtggcatctgcaaggggacatgtagacctactttgaagatttcgttggaaacggaatcatcttcacataaaaactatacagaagcagtctcagaatcttctttgtgatgtttgcattcaaatcccagagttgaactttcctttcaaagttcacgtttgaaacactctttttgcaggatctacaagtggatatttggaccactctgtgtccttcgttcgaaacgggtatatcttcacatgacatctagacagaagctttctcagaaaattctttgggatgattgagtggaactcacagagctgaacattccttgcgatgtagcagtttagaaacacactttctgcagaatctgcaagtgcatatttggacctctctgaggaattcgttggaaacgggataatttcagctgactaaacagaagcattctcagaacgttcttcgtgatgtctgcattcaactcacagtgtggaacctttctttgatagttcaggtttgaaacactctttttgtagaaactgcaaggggataattgcactgctttgaggcctaccgtaataaaggaaataacttcctataaaaagaagacagaagcattctcagaaccctcttcgtgatgtttgcattcaactcacagtgctgaacctttctttgatagttcagctttgaaacactcttcttgtagaaactgcaagtggatatttggtcctctctgaggatttcgttggaaacgggataaaccgcacagaactaaacagaagaattctcagagccctcttcgtgatgtttgcattcaactcacagtgctgaacctttctttgatagtgcagctttgaaacactctttttgtagaaactgcaagtggatgtttggtcctctctgaggatttcgttggaaacgggataaaccgcacagaactaaaacagaagcattgtcagaaacttctttgtgatgattgcattcaactcacagagttgaaggttccttttcaaacagcagtttccaatcactctttctgtggaatctgcaagtggatatttgggcctctctgaggatttcgttggaaacgggataaaacgcacagaactaaaacagaagcattctcagaaacttctctgtgatgtttgtgttcaactcccagagtttcacgttgcttttcatagagtagttctgaaacatgcttttcgtagtgtctgcaagtggacatttggagcgctttcaggcctgtggtggaaaacgaattatggtcacataaaaactggagagaagcattctcagaaaatactttgtgatgattgagtttaaatcacagagctgaccattcctttggatggagcaggtttgagacacactttttgtagaatctacaagtggatatttggacctctctgaggatttcgttggaaacgggataactgcacctaactaaacggaagcattctcagaaactgctttgtgatgattgcattcacctcacagagttgaacattcctattgatagagcagtttggaaacactcttgttgtggaatgtgcaagtggagatttggagcgctttgaggcctatggtagtaaagggaatagcttcatagaaaaactagacagatgcattctcaggaaccttttggtgatgtttgtattcaactcccagagttgaactttcctttggaaagagcagctatgaaacactctttttctagaatctgcaagtggacgtttggagggctttgtggtttgtggtggaaaaggaaatatcttcacctaaatactagatagaagcattctcagaagcttctctgtgatgactgcattcaactcacggagttgaacactccttttgagagcgcagttttgaaactctctttctgtggcatctgcaaggggacatgtagacctctttgaagatttcgttggaaacggaatcatcttcacataaaaactatacagaagcagtctcagaatcttctttgtgatgtttgcattcaaatcccagagttgaactttcctttcaaagttcacgtttgaaacactctttttgcaggatctacaagtggatatttggaccactctgtgtccttcgttcgaaacgggtatatcttcacacgacatctagacagaagctttctcagaaaattctttgggatgattgagtggaactcacagagctgaacattccttgcgatgtagcagtttagaaacacactttctgcagaatctgcaagtgcatatttggacctctctgaggaattcgttggaaacgggataatttcagctgactaaacagaagcattctcagaaccttcttcgtgatgtctgcattcaactcacagtgtggaacctttctttgatagttcaggtttgaaacactctttttgtagaaactgcaaggggataattgcacttctttgaggcctaccgtagtaaaggaaataacttcctatagaaagaagacagaagcattctcagaaccctcttcgtgatgtttgcattcaactcacagtgctgaacctttctttgatagttcagctttgaaacactcttcttgtagaaactgcaagtggatatttggtcctctctgaggatttcgttggaaacgggataaaccgcacagaactaaacagaagaattctcagagccctcttcgtgatgtttgcattcaactcacagtgctgaacctttctttgatagtgcagctttgaaacactctttttgtagaaactgcaagtggatgtttggtcctctctgaggatttcgttggaaacgggataaaccgcacagaactaaaacagaagcattgtcagaaacttctttgtgatgattgcattcaactcacagagttgaaggttccttttcaaacagcagtttccaatcactctttctgtggaatctgcaagtggatatttgggcctctctgaggatttcgttggaaacgggataaaacgcacagaactaaaacagaagcattctcagaaacttctctgtgatgtttgtgttcaactcccagagtttcacgttgcttttcatagagtagttctgaaacatgcttttcgtagtgtctgcaagtggacatttggagcgctttcaggcctgtggtggaaaacgaattatggtcacataaaaactggagagaagccttctcagaaacttctctgtgatgattgcattcaactcacagagttgaaccctcctatggatagagcagtgttgaaactctctttttgtggaatctgcaagtggatatgtggacctctccgaagatgtctttggaaacgggaatatcttcacataaaaactaaacagaagcattctcagaaacttcttggtgatgtttgcattcaaatcccagagttgaaccttcctttgatagttcaggtttgaaacactctttctgtaggatctgcaagtggctatttggaccactctgtggccttcgttcgaaacgggtatatcttcgcataaaatctagacagaagcattctcagaaaatactttgtgatgattgagtttaactcacagagctgaacattcctttggatggagcaggttcgagacacactttttgtagaatccacaagtggatatttggacctctctgaggatttcgttggaaacgggataactgcaccgaactaaacggaagcattctcagaaactgctttgtgatgattgcattcacctcacagagttgaccattcctattgatagagcagtttggaaacactcttgttgtggaatgtgcaagtggagatttggagcgctttgaggcctatggtagtaaagggaatagcttcatagaaaaactagacagatgcattctcaggaaccttttggtgatgtttgtattcaactcccagagttgaactttcctttggaaagagcagctatgaaacactctttttctagaatctgcaagtggacgtttggagggctttgtggtttgtggtggaaaaggaaatatcttcacctaaatactagatagaagcattctcagaagcttctctgtgatgactgcattcaactcacggagttgaacactccttttgagagcgcagttttgaaactctctttctgtggcatctgcaaggggacatgtagacctctttgaagatttcgttggaaacggaatcatcttcacataaaaactatacagaagcagtctcagaatcttctttgtgatgtttgcattcaaatcccagagttgaactttcctttcaaagttcacgtttgaaacactctttttgcaggatctacaagtggatatttggaccactctgtgtccttcgttcgaaacgggtatatcttcacacgacatctagacagaagctttctcagaaaattctttgggatgattgagtggaactcacagagctgaacattccttgcgatgtagcagtttagaaacacactttctgcagaatctgcaagtgcatatttggacctctctgaggaattcgttggaaacgggataatttcagctgactaaacagaagcattctcagaaccttcttcgtgatgtctgcattcaactcacagtgtggaacctttctttgatagttcaggtttgaaacactctttttgtagaaactgcaaggggataattgcacttctttgaggcctaccgtagtaaaggaaataacttcctatagaaagaagacagaagcattctcagaaccctcttcgtgatgtttgcattcaacacacagtgctgaacctttctttgatagttcagctttgaaacactcttcttgtagaaactgcaagtggatatttggtcctctctgaggatttcgttggaaacgggataaaccgcacagaactaaacagaagcattctcagaaccttcttcgtgatgtttgcattcaactcacagtgttgaacctttctttgatagttcaggtttgaaacggtctttctgtagaaactgcaagtagatatttggacctctctgaggatttcgttggaaacgggataacccgcacagaactaaaacagaagcattcacagaaaactcttggtgacgactgagtttaactcacagagctgaacattcctttggatggagcagtttcgaaacacactatttgtagaatgtgcaagtggatatttgggcctctctgaggatttcgttggaaacgggataaaccgcacagaactaaacagaagcattctcagaaactactttgtgatgattgcattcaagtctcagagttgaacattccctttcacagagcagtttggaaactctctttctgtagaatctgcaagtggagatatggaccgctttgaggcctatggtagtaaaggaaatagctttatataaaagctagacagtagcattctcagaaacttctttgtgatgcttgcattcaactcacagagttgaactttcctttcgagagagaagctttgaaacactctttttccagaatctgcaagtggacatttggagggctttgaggcctgtggtggaaaaggaattaacttcccgtaaaagctagatagaagcattgtcagaaacttctttgtgatgattgcattcaactcacagagatgaaggttcctttacaaacagcagtttccaaacactctttctgtggaatctgcaagtggatatttggacctctttgaagatttcgttggaaacgggagaatcttcacagaaaagctaaacagaagcattctcagaaacttctctgtgatgtttgtgttcaactcccagagtttcacattgcttttcatagagtagttctgaaacatgcttttcgtagtgtctgcaagtggacatttggagcgctttcaggcctgtggtggaaaacgaattatggtcccataaaaactggagagaagccttctcagaaacttctctgtgatgattgcattcaactcacagatttgaaccctcctatggatagagcattgttgaaactctctttttgtggaatctgcaagtggatatgtggacctctccgaagatgtctttggaaacgggaatatcttcacataaaaactaaacagaagcattctcagaaacttcttggtgatgtttgcattcaaatcccagagttgaaccttcctgtgatagttcaggtttgaaacactctttttgtaggatctgcaagtggatatttggaccactctgtggccttcgttcgaaacgggtacatcttcacataaaatctagacagaagcattctcagaaaatactttgtgatgattgagtttaactcacagagctgaacattcctttggatggagcaggtttgagacacactttttgtagaatctacaagtggatatttggacctctctgaggatttcgttggaaacgcgataactgcacctaactaaacggaagcattctcagaaactgctttgtgatgattgcattcacctcacagagttgaacattcctattgatagagcagtttggaaacactcttgttgtggaatgtgcaagtggagatttggagcgctttgaggcctatggtagtaaagggaatagcttcatagaaaaactagacagatgcattctcaggaactttttggtgatgtttgtattcaactcccagagttgaactttcctttggaaagagcagctatgaaacactgtttttctagaatctgcaagtggacgtttggagggctttgtggtttgtggtggaaaaggaaatatcttcacctaaatactagatagaagcatcctcagaagcttctctgtgatgactgcattcaactcacggagttgaacactccttttgagagcgcagttttgaaactctctttctgtggcatctgcaaggggacatgtagacctctttgaagatttcgttggaaacggaatcatcttcacataaaaactatacagaagcagtctcagaatcttctttgtgatgtttgcattcaaatccccgagttgaactttcctttcaaagttcacgtttgaaacactctttttgcaggatctacaagtggatatttggaccactctgtgtccttcgttcgaaacgggtatatcttcacatgacatctagacagaagctttctcagaaaattctttgggatgattgagttgaactcacagagctgagcattccttgcgatgtagcagtttagaaacacactttctgcagaatctgcaagtgcatatttggacctctctgaggaattcgttggaaacgggataatttcagctgactaaacagaagcattctcagaaccttcttcgtgatgtctgcattcaacacaaagtgtggaacctttctttgatagttcaggttttaaaaactctttttgtagaaactgcaaggggataattgcactctttgaggagtaccgtagtaaaggaaataacttcctataaaaagaagacagaagcattctcagaaccctcttcgtgatgtttgcattcaactcacagtgctgaacctttctttgatagttcagctttgaaacactcttcttgtagaaactgcaagtggatatttggtcctctctgaggatttcgttggaaacgggataaaccgcacagaactaaacagaagaattctcagagccctcttcgtgatgtttgcattcaactcacagtgctgaacctttctttgatagtgcagctttgaaacactctttttgtagaaactgcaagtggatgtttggtcctctctgaggatttcgttggaaacgggataaaccgcacagaactaaaacagaagcattgtcagaaacttctttgtgatgattgcattcaactcacagagttgaaggttccttttcaaacagcagtttccaatcactctttctgtggaatctgcaagtggatatttgggcctctctgaggatttcgttggaaacgggataaaacgcacagaactaaaacagaagcattctcagaaacttctctgtgatgtttgtgttcaactcccagagtttcacgttgcttttcatagagtagttctgaaacatgcttttcgtagtgtctgcaagtggacatttggagcgctttcaggcctgtggtggaaaacgaattatggtcacataaaaactggagagaagccttctcagaaacttctctgtggtgattgcattcaactcacagagttgaaccctcctatggatagagcagtgttgaaaatctctttttgtggaatctgcaagtggatatgtggacctctccgaagatgtctttggaaacgggaatatcttcacataaaaactaaacagaagcattctcagaaacttcttggtgatgtttgcattcaaatcccagagttgaaccttcctttgatagttcaggtttgaaacactctttttgtaggatctgcaagtggctatttggaccactctgtggccttcgttcgaaacgggtatatcttcgcataaaatctagacagaagcattctcagaaaatactttgtgatgattgagtttaaatcacagagctgaacattcctttggatggagcaggtttgagacacactttttgtagaatctacaagtggatatttggacctctctgaggatttcgttggaaacgggataactgcacctaactaaacggaagcattctcagaaactgctttgtgatgattgcattcacctcacagagttgaacattcctattgatagagcagtttggaaacactcttgttgtggaatgtgcaagtggagatttggagcgctttgaggcctatggtagtaaagggaatagcttcatagaaaaactagacagatgcattctcaggaactttttggtgatgtttgtattcaactcccagagttgaactttcctttggaaagagcagctatgaaacactctttttctagaatctgcaagtggacgtttggagggctttgtggtttgtggtggaaaaggaaatatcttcacctaaatactagatagaagcattctcagaagcttctctgtgatgactgcattcaactcacggagttgaacactccttttgagagcgcagttttgaaactctctttctgtggcatctgcaaggggacatgtagacctctttgaagatttcgttggaaacggaatcatcttcacataaaaactatacagaagcagtctcagaatcttctttgtgatgtttgcattcaaatcccagagttgaactttcctttcaaagttcacgtttgaaacactctttttgcaggatctacaagtggatatttggaccactctgtgtccttcgttcgaaacgggtatatcttcacacgacatctagacagaagctttctcagaaaattctttgggatgattgagtggaactcacagagctgaacattccttgcgatgtagcagtttagaaacacactttctgcagaatctgcaagtgcatatttggacctctctgaggaattcgttggaaacgggataatttcagctgactaaacagaagcattctcagaaccttcttcgtgatgtctgcattcaactcacagtgtggaacctttctttgatagttcaggtttgaaacactctttttgtagaaactgcaaggggataattgcacttctttgaggcctaccgtagtaaaggaaataacttcctatagaaagaagacagaagcattctcagaaccctcttcgtgatgtttgcattcaactcacagtgctgaacctttctttgatagttcagctttgaaacactcttcttgtagaaactgcaagtggatatttggtcctctctgaggatttcgttggaaacgggataaaccgcacagaactaaacagaagaattctcagagccctcttcgtgatgtttgcattcaactcacagtgctgaacctttctttgatagtgcagctttgaaacactctttttgtagaaactgcaagtggatgtttggtcctctctgaggatttcgttggaaacgggataaaccgcacagaactaaaacagaagcattgtcagaaacttctttgtgatgattgcattcaactcacagagttgaaggttccttttcaaacagcagtttccaatcactctttctgtggaatctgcaagtggatatttgggcctctctgaggatttcgttggaaacgggataaaacgcacagaactaaaacagaagcattctcagaaacttctctgtgatgtttgtgttcaactcccagagtttcacgttgcttttcatagagtagttctgaaacatgcttttcgtagtgtctgcaagtggacatttggagcgctttcaggcctgtggtggaaaacgaattatggtcacataaaaactggagagaagccttctcagaaacttctctgtgatgattgcattcaactcacagagttgaaccctcctatggatagagcagtgttgaaactctctttttgtggaatctgcaagtggatatgtggacctctccgaagatgtctttggaaacgggaatatcttcacataaaaactaaacagaagcattctcagaaacttcttggtgatgtttgcattcaaatcccagagttgaaccttcctttgatagttcaggtttgaaacactctttctgtaggatctgcaagtggctatttggaccactctgtggccttcgttcgaaacgggtatatcttcgcataaaatctagacagaagcattctcagaaaatactttgtgatgattgagtttaaatcacagagctgaccattcctttggatggagcaggtttgagacacactttttgtagaatctacaagtggatatttggacctctctgaggatttcgttggaaacgggataactgcacctaactaaacggaagcattctcagaaactgctttgtgatgattgcattcacctcacagagttgaacattcctattgatagagcagtttggaaacactcttgttgtggaatgtgcaagtggagatttggagcgctttgaggcctgtggtagtaaagggaatagcttcatagaaaaactagacagatgcattctcaggaaccttttggtgatgtttgtattcaactcccagagttgaacttttcctttggaaagagcagctatgaaacactctttttctagaatctgcaagtggacgtttggagggctttgtggtttgtggtggaaaaggaaatatcttcacctaaatactagatagaagcattctcagaagcttctctgtgatgactgcattcaactcacggagttgaacactccttttgagagcgcagttttgaaactctctttctgtggcatctgcaaggggacatgtagacctctttgaagatttcgttggaaacggaatcatcttcacataaaaactatacagaagcagtctcagaatcttctttgtgatgtttgcattcaaatccctgagttgaactttcctttccaagttcacgtttgaaacactctttttgcaggatctacaagtggatatttggaccactctgtgtccttcgttcgaaacgggtatatcttcacatgacatctagacagaagctttctcagaaaattctttgggatgattgagttgagcaaacagagctgaacactccttgtgatgtagcagtttagaaacacactttctgcagaatctgcaagtgcatatgtggacctctctgaggaattcgttggaaacgggataatttcagctgactaaacagaagcattctcagaaccttcttcgtgatgtctgcgttcaactcacagtgtggaacctttctttgatagttcaggtttgaaacactctttttgtagaaactgcaaggggatcattgcacttctttgaggcctaccgtagtaaaggagataacttgctataaaaagaagacagaagcattctcagaacactcttcgtgatgtttgcattcaactcacggtgctgaacctttctttgatagttcagctttgaaacactctttttgtagaaactgcaagtggatatttggtcctctctgaggatttcgttggaaacgggataaaccgcacagaactaaacagaagcattctcagaaccttcttcgtgatgtttgcattcaactcacagtgttgaacctttctttgatagttcaggtttgaaacggtctttctgtagaaactgcaagtagatatttagacctctctgaggatttcgttggaaacgggataaacagcacagaactaaaacagaagcattcacagaaaactcttggtgacgactgagtttaactcacagagctgaacattcctttggatggagcagtttcgaaacacactatttgtagaatgtgcaagtggatatgtgggcctctgtgaggatttcgttggaaacgggataaaccgcacagaactaaacagaagcattctcagaaactactttgtgatgattgcattcaagtcacagagttgaacattccctttgacagagcagtttggaaactctctttgtgtagaatctgcaagtggagatatggaccgctttgaggcctatggtagtaaaggaaatagcttcatataaaagctagtcagtagcattctcagaaacttctttgtgatgcttgcattcaactcacagagttgaactttcctttcgagagagaagctttgaaacactctttttccagaatgtgcaagtggacatttggggagctttgaggcctgtggtggaaaaggaattatcttcccgtaaaagctagatagaagcattgtcagaaacttctttgtgatgattgcattcaactcacagagttgaaggttccttttcaaacagcagtttccaatcactctttctgtggaatctgcaagtggatatttcgacctctttgaagatttcgttggaaacgggagaatcttcacagaaaagctaaacagaagcattctcagaaacttctctgtgatgtttgtgttcaactcccagagtttcacgttgcttttcatagagtagttctgaaacatgcttttcgtagtgtctgcaagtggacatttggagcgctttcaggcctgtggtggaaaacgaattatggtcacataaaaactggagagaagccttctcagaaacttctctgtgatgattgcattcaactcacaggagttgaaccctcctatggatagagcagtgttgaaactctctttttgtggaatctgcaagtggatatgtggacctctccgaagatgtctttggaaacgggaatatcttcacataaaaactaaacagaagcattctcagaaacttcttggtgatgtttgcattcaaatcccagagttgaaccttcctttgatagttcaggtttgaaacactctttctgtaggatctgcaagtggctatttggaccactctgtggccttcgttcgaaacgggtatatcttcgcataaaatctagacagaagcattctcagaaaatactttgtgatgattgagtttaaatcacagagctgaccattcctttggatggagcaggtttgagacacactttttgtagaatctacaagtggatatttggacctctctgaggatttcgttggaaacgggataactgcacctaactaaacggaagcattctcagaaactgctttgtgatgattgcattcacctcacagagttgaacattcctattgatagagcagtttggaaacactcttgttgtggaatgtgcaagtggagatttggagcgctttgaggcctatggtagtaaagggaatagcttcatagaaaaactagacagatgcattctcaggaactttttggtgatgtttgtattcaactcccagagttgaactttcctttggaaagagcagctatgaaacactctttttctagaatctgcaagtggacgtttggagggctttgtggtttgtggtggaaaaggaaatatcttcacctaaatactagatagaagcattctcagaagcttctctgtgatgactgcattcaactcacggagttgaacactccttttgagagcgcagttttgaaactctctttctgtggcatctgcaaggggacatgtagacctctttgaagatttcgttggaaacggaatcatcttcacataaaaactatacagaagcagtctcagaatcttctttgtgatgtttgcattcaaatcccagagttgaactttcctttcaaagttcacgtttgaaacactctttttgcaggatctacaagtggatatttggaccactctgtgtccttcgttcgaaacgggtatatcttcacacgacatctagacagaagctttctcagaaaattctttgggatgattgagtggaactcacagagctgaacattccttgcgatgtagcagtttagaaacacactttctgcagaatctgcaagtgcatatttggacctctctgaggaattcgttggaaacgggataatttcagctgactaaacagaagcattctcagaaccttcttcgtgatgtctgcattcaactcacagtgtggaacctttctttgatagttcaggtttgaaacactgtttttgtggaaactgcaaggggataattgcacttctttgaggcctaccgtagtaatggaaataacttcctataaaaagaagacagaagcattctcagaaccttcttcgtgatgtttgcattcaactcacaagtgctgaacctttctttgatagttcagctttgaaacactctttttgtagaaactgcaagtggatatttggtcctctctgaggatttcgttggaaacgggataaaccgcacagaactaaacagaagcattcacagaaaactcttggtgacgactgattttaactcacagagctgaacattcctttggatggagcagtttcgaaacacactctttgtagaatgtgcaagtggatatttgggcctctctgaggatttcgttggaaacgggataaaccgcacagaactaaaacagaagcactctgagaaactactttgtgatgattgcattcaagtcacagagctgaacattccctttgacagagcagtttggaaactctctttgtgtagaatctgtaagtggagatatggaatgctttgaggactatggtagtaaaggaaatagcttcatataaaagctagacagtagcattctcagaaacttctttgtgatgcttgcattcaactcacagagttgaaatttccttttgagagagaagctttgaaacactctttttccagaatgttcaagtggatatttgcagggctttgaggcctgtggtggaaaaggaattatcttcccgtaaaagctagatagaagcattgtcagaaacttctttgtgatgattgcattcaactcacagagttgaaggttccttttcaaacagcagtttccaatcactctttctgtggaatctgcaagtggatatttcgacctctttgaagatttcgttggaaacgggagaatcttcacagaaaagctaaacagaagcattctcagaaacttctctgtgatgtttgtgttcaactcccagagtttcacgttgcttttcatagagtagttctgaaacatgcttttcgtagtgtctgcaagtggacatttggagcgctttcaggcctgtggtggaaaacgaattatggtcacataaaaactggagagaagccttctcagaaacttctctgtgatgattgcattcaactcacagagttgaaccctcctatggatagagcagtgttgaaactctctttttgtggaatctgcaagtggatatgtggacctctccgaagatgtctttggaaacgggaatatcttcacataaaaactaaacagaagcattctcaggaaacttcttggtgatgtttgcattcaaatcccagagttgaaccttcctttgatagttcaggtttgaaacactctttttgtaggatctgcaagtggctatttggaccactctgtggccttcgttcgaaacgggtatatcttcgcataaaatctagacagaagcattctcagaaaatactttgtgatgattgagtttaaatcacagagctgaccattcctttggatggagcaggtttgagacacactttttgtagaatctacaagtggatatttggacctctctgaggattcgttggaaacgggataactgcacctaactaaacggaagcattctcagaaactgctttgtgatgattgcattcacctcacagagttgaacattcctattgatagagcagtttggaaacactcttgttgtggaatgtgcaagtggagatttggagcgctttgaggcctatggtagtaaagggaatagcttcatagaaaaactagacagatgcattctcaggaactttttggtgatgtttgtattcaactcccagagttgaactttcctttggaaagagcagctatgaaacactctttttctagaatctgcaagtggacgtttggagggctttgtggtttgtggtggaaaaggaaatatcttcacctaaatactagatagaagcatcctcagaagcttctctgtgatgactgcattcaactcacggagttgaacactccttttgagagcgcagttttgaaactctctttctgtggcatctgcaaggggacatgtagacgtctttgaagatttcgttggaaacggaatcatcttcacataaaaactacacagaagcagtctcagaatcttctttgtgatgtttgcattcaaatccccgagttgaactttcctttcaaagttcacgtttgaaacactctttttgcaggatctacaagtggatatttggaccactctgtgtccttcgttcgaaacgggtatatcttcacatgacatctagacagaagctttctcagaaaattctttgggatgattgagttgaactcacagagctgagcattccttgcgatgtagcagtttagaaacacactttctgcagaatctgcaagtgcatatttggacctctgtgaggaattcgttggaaacgggataatttcagctgactaaacagaagcattctcagaaccttcttcgtgatgtctgcattcaactcacagtgtggaacctttctttgatagttcaggtttgaaacactctttttgtagaaactgcaaggggatcattgcactctttgaggagtaccgtagtaaaggaaataacttcctataaaaagaagacagaagcattctcagaaccctcttcgtgatgtttgcattcaactcacagtgctgaacctttctttgatagttcagctttgaaacactcttcttgtagaaactgcaagtggatatttggtcctctctgaggatttctttggaaacgggataaaccacacagaactaaacagaagcattctcagaaccttcttcgtgatgtttgcattcaactcacagtgttgaacctttctttgatagttcaggtttgaaacggtctttctgtagaaactgcaagtagatatttggacctctctgaggatttcgttggaaacgggataacccgcacagaactaaaacagaagcattcacagaaaactcttggtgacgactgagtttaactcacagagctgaacattcctttggatggagcagtttcgaaacacactatttgtagaatgtgcaagtggatatttaggcctctctgaggatttcgttggaaacgggataaaccgcacagaactaaacagaagcattctcagaaactactttgtgatgattgcattcaagtcacagagttgaacattccctttgacagagcagtttggaaactctctttgtgtagaatctgcaagtggagatatggaccgctttgaggcctatggtagtaaaggaaatagcttcatataaaagctagacagtagcattctcagaaacttctttgtgatgcttgcattcaactcacagagttgaactttcctttcgagagagaagctttgaaacactctttttccagaatctgcaagtggacatttggagggctttgaggcctgtggtggaaaaggaattatcttcccgtaaaagctagatagaagcattgtcagaaacttctttgtgatgattgcattcaactcacagagttgaaggttccttttcaaagagcagtttccaatcactctttgtgtggaatctgcaagtggatatttggacctattttgaagatttcgttggaaacgggagaatcttcacaggaaagctaaacagaagcattctcagaaacttctctgtgatgtttgtgttcaactcccagagtttcacattgcttttcatagagtagttctgaaacatgcttttcgtagtgtctacaagtggacatttggagcgctttcaggcctgtggtggaaaacgaattatggtcacataaaaactggagagaagccttctcagaaacttctctgtgatgattgcattcaactcacagagttgaaccctcctatggatagagcagtgttgaaactctctttttgtggaatctgcaagtggatatgtggacctctccgaagatgtctttggaaacgggaatatcttcacataaaaactaaacagaagcattctcagaaacttcttggtgatgtttgcattcaaatcccagagttgaaccttcctttgatagttcaggtttgaaacactctttttgtaggatctgcaagtggatatttggaccactctgtggccttcgttcgaaacgggtatatcttcgcataaaatctagacagaagcattctcagaaaatactttgtgatgattgagtttaaatcacagagctgaacattcctttggatggagcaggtttgagacacactttttgtagaatctacaagtggatatttggacctctcggaggatttcgttggaaacgggataactgcacctaactaaacggaagcattctcagaaactgctttgtgatgattgcattcacctcacagagttgaacattcctattgatagagcagtttggaaacactcttgttgtggaatgtgcaagtggagatttggagcgctttgaggcctatggtagtaaagggaatagcttcatagaaaaactagacagatgcattctcaggaactttttggtgatgtttgtattcaactcccagagttgaactttcctttggaaagagcagctatgaaacactctttttctagaatctgcaagtggacgtttggagggctttgtggtttgtggtggaaaaggaaatatcttcacctaaatactagatagaagcatcctcagaagcttctctgtgatgactgcattcaactcacggagttgaacactccttttgagagcgcagttttgaaactctctttctgtggcatctgcaaggggacatgtagacctctttgaagatttcgttggaaacggaatcatcttcacataaaaactatacagaagcagtctcagaatcttctttgtgatgtttgcattcaaatccccgagttgaactttcctttcaaagttcacgtttgaaacactctttttgcaggatctacaagtggatatttggaccactctgtgtccttcgttcgaaacgggtatatcttcacatgacatctagacagaagctttctcagaaaattgtttgggatgattgacttgaactcacagagctgagcattccttgcgatgtagcagtttagaaacacactttctgcagaatctgcaagtgcatatttggacctctctgaggaattcgttggaaacgggataatttcagctgactaaacagaagcattctcagaaccttcttcgtgatgtctgcattcaactcacagtgtggaacctttctttgatagttcaggtttgaaacactctttttgtagaaactgcaaggggataattgcactctttgaggagtaccgtagtaaaggaaataacttcctataaaaagaagacagaagcattctcagaaccctcttcgtgatgtttgcattcaactcacagtgctgaacctttctttgatagttcagctttgaaacactctttttgtagaaactgcaagtggatatttggtcctctctgagcatttcgttggaaacgggataaactgcacagaactaaacagaagcattctcagaaccttcttcgtgatgtttgcattcaactcacagtgttgaacctttctttgatagttcaggtttgaaacggtctttctgtagaaactgcaagtagatatttggacctctctgaggatttcgttggaaacgggataacccgcacagaactaaaacagaagcattcacagaaaactcttggtgacgactgagtttaactcacagagctgaacattcctttggatggagcagtttcgaaacacactatttgtagaatgtgcaagtggatatttaggcctctctgaggatttcgttggaaacgggataaaccgcacagaactaaacagaagcattctcagaaactactttgtgatgattgcattcaagtcacagagttgaacattccctttgacagagcagtttggaaactctctttgtgtagaatctgcaagtggagatatggaccgctttgaggcctatggtagtaaaggaaatagcttcatataaaagctagacagtagcattctcagaaacttctttgtgatgcttgcattcaactcacagagttgaactttcctttcgagagagaagctttgaaacactctttttccagaatctgcaagtggacatttggagggctttgaggcctgtggtggaaaaggaattatcttcccgtaaaagctagatagaagcattgtcagaaacttctttgtgatgattgcatacaagtcacagagttgaaggttccttttcaaagagcagtttccaatcactctttctgtggaatctgcaagtggatatttggacctctttgaagatttcgttggaaacgggagaatcttcacagaaaagctaaacagaagcattctcagaaacttctctgtgatgtttgtgttcaactcccagagtttcacgttgcttctcatagagtagttctgaaacatgcttttcgtagtgtctgcaagtggacatttggagcgctttcaggcctgtggtggaaaacgaattatggtcacataaaaactggagagaagccttctcagaaacttctctgtgatgattgcattcaactcacagagttgaaccctcctatggatagagcagtgttgaaactctctttttgtggaatctgcaagtggatatgtggacctctccgaagatgtctttggaaacgggaatatcttcacataaaaactaaacagaagcattctcagaaacttcttggtgatgtttgcattcaaatcccagagttgaaccttcctttgatagttcaggtttgaaacactctttttgtaggatctgcaagtggctatttggaccactctgtggccttcgttcgaaacgggtatatcttcgcataaaatctagacagaagcattctcagaaaatactttgtgatgattgagtttaaatcacagagctgaacattcctttggatggagcaggtttgagacacactttttgtagaatctacaagtggatatttggacctctctgaggatttcgttggaaacgggataactgcacctaactaaacgaagcattctcagaaactgctttgtgatgattgcattcacctcacagagttgaacattcctattgatagagcagtttggaaacactcttgttgtggaatgtgcaagtggagatttggagcgctttgaggcctacggtagtaaagggaatagcttcatagaaaaactagacagatgcattctcaggaactttttggtgatgtttgtattcaactcccagagttgaactttcctttggaaagagcagctatgaaacactctttttctagaatctgcaagtggacgtttggagggctttgtggtttgtggtggaaaaggaaatatcttcacctaaatactagatagaagcattctcagaagcttctctgtgatgactgcattcaactcacggagttgaacactccttttgagagcgcagttttgaaactctctttctgtggcatctgcaaggggacatgtagacctctttgaagatttcgttggaaacggaatcatcttcacataaaaactatacagaagcagtctcagaatcttctttgtgatgtttgcattcaaatcccagagttgaactttcctttcaaagttcacgtttgaaacactctttttgcaggatctacaagtggatatttggaccactctgtgtccttcgttcgaaacgggtatatcttcacacgacatctagacagaagctttctcagaaaattctttgggatgattgagttgagcaaacagagctgaacactccttgtgatgtagcagtttagaaacacacgttctgcagaatctgcaagtgcatatgtggacctctctgaggaattcgttggaaacgggataatttcagctgactaaacagaagcattctcagaaccttcttcgtgatgtctgcattcaactcacagtgtggaacctttctttgatagttcaggtttgaaacactctttttgtagaaactgcaaggggataattgcacttctttgaggcctaccgtagtaaaggaaataacttcctatagaaagaagacagaagcattctcagaaccctcttcgtgatgtttgcattcaactcacagtgctgaacctttctttgatagttcagctttgaaacactcttcttgtagaaactgcaagtggatatttggtcctctctgaggatttcgttggaaacgggataaaccgcacagaactaaacagaagaattctcaggagccctcttcgtgatgtttgcattcaactcacagtgctgaacctttctttgatagtgcagctttgaaacactctttttgtagaaactgcaagtggatgtttggtcctctctgaggatttcgttggaaacgggataaaccgcacagaactaaaacagaagcattctcagaaccttcttcgtgatgtttgcattcaactcacagtgttgaacctttctttgatagttcaggtttgaaacggtctttctgtagaaactgcaagtagatatttggacctctgctgaggatttcgttggaaacgggataacccgcacagaactaaaacagaagcattcacagaaaacacttggtgacgactgagtttaactcacagagctgaacattcctttggatggagcagtttcgaaacacactattggtagaatctgcaagtggatatttgggcctctctgaggatttcgttggaaacgggataaaccgcacagaactaaaacagaagcattctcagaaactactttgtgatgattgcattcaagtcacagagttgaacattccctttgacagagcagtttggaaactctctttgtgtagaatctgcaagtggagatatggaccgctttgaggcctatggtagtaaaggaaatagcttcatataaaagctagacagtagcattctcagaaacttctttgtgatgcttgcattcaactcacagagttgaactttcctttcgagagagaagctttgaaacactctttttccagaatctgcaagtggacatttggagggctttgaggcctgtggtggaaaaggaattatcttcccgtaaaagctagatagaagcattgtcagaaacttctttgtgatgattgcattcaactcacagagttgaaggttccttttcaaagagcagtttccaatcactctttgtgtggaatctgcaagtggatatttggacctattttgaagatttcgttggaaacgggagaatcttcacaggaaagctaaacagaagcattctcagaaacttctctgtgatgtttgtgttcaactcccagagtttcacattgcttttcatagagtagttctgaaacatgcttttcgtagtgtctacaagtggacatttggagcgctttcaggcctgtggtggaaaacgaattatggtcacataaaaactggagagaagccttctcagaaacttctctgtgatgattgcattcaactcacagagttgaaccctcctatggatagagcagtgttgaaactctctttttgtggaatctgcaagtggatatgtggacctctccgaagatgtctttggaaacgggaatatcttcacataaaaactaaacagaagcattctcagaaacttcttggtgatgtttgcattcaaatcccagaagttgaaccttcctttgatagttcaggtttgaaacactctttttgtaggatctgcaagtggatatttggaccactctgtggccttcgttcgaaacggctatatcttcgcataaaatctagacagaagcattctcagaaaatactttgtgatgattgagtttaaatcacagagctgaccattcctttggatggagcaggtttgagacacactttttgtagaatctacaagtggatatttggacctctctgaggatttcgttggaaacgggataactgcacctaactaaacggaagcattctcagaaactgctttgtgatgattgcattcacctcacagagttgaacattcctattgatagagcagtttggaaacactcttgttgtggaatgtgcaagtggagatttggagcgctttgaggcctatggtagtaaagggaatagcttcatagaaaaactagacagatgcattctcaggaactttttggtgatgtttgtattcaactcccagagttgaactttcctttggaaagagcagctatgaaacactctttttctagaatctgcaagtggacgtttggagggctttgtggtttgtggtggaaaaggaaatatcttcacctaaatactagatagaagcattctcagaagcttctctgtgatgactgcattcaactcacggagttgaacactccttttgagagcgcagttttgaaactctctttctgtggcatctgcaaggggacatgtagacctctttgaagatttcgttggaaacggaatcatcttcacataaaaactatacagaagcagtctcagaatcttctttgtgatgtttgcattcaaatcccagagttgaactttcctttcaaagttcacgtttgaaacactctttttgcaggatctacaagtggatatttggaccactctgtgtccttcgttcgaaacgggtatatcttcacacgacatctagacagaagctttctcagaaaattctttgggatgattgagtggaactcacagagctgaacattccttgcgatggagcagtttagaaacacactttctgcagaatctgcaagtgcatatttggacctctctgaggaattcgttggaaacgggataatttcagctgactaaacagaagcattctcagaaccttcttcgtgatgtctgcattcaactcacagtgtggaacctttctttgatagttcaggtttgaaacactctttttgtagaaactgcaaggggataattgcacttctttgaggcctaccgtagtaaaggaaataacttcctatagaaagaagacagaagcattctcagaaccctcttcgtgatgtttgcattcaactcacagtgctgaacctttctttgatagttcagctttgaaacactcttcttgtagaaactgcaagtggatatttggtcctctctgaggatttcgttggaaacgggataaaccgcacagaactaaacagaagaattctcagagccctcttcgtgatgtttgcattcaactcacagtgctgaacctttctttgatagtgcagctttgaaacactctttttgtagaaactgcaagtggatgtttggtcctctctgaggatttcgttggaaacgggataaaccgcacagaactaaaacagaagcattgtcagaaacttctttgtgatgattgcattcaactcacagagttgaaggttccttttcaaacagcagtttccaatcactctttctgtggaatctgcaagtggatatttgggcctctctgaggatttcgttggaaacgggataaaacgcacagaactaaaacagaagcattctcagaaacttctctgtgatgtttgtgttcaactcccagagtttcacgttgcttttcatagagtagttctgaaacatgcttttcgtagtgtctgcaagtggacatttggagcgctttcaggcctgtggtggaaaacgaattatggtcacataaaaactggagagaagccttctcagaaacttctctgtgatgattgcattcaactcacagagttgaaccctcctatggatagagcagtgttgaaactctctttttgtggaatctgcaagtggatatgtggacctctccgaagatgtctttggaaacgggaatatcttcacataaaaactaaacagaagcattctcagaaacttcttggtgatgtttgcattcaaatcccagagttgaaccttcctttgatagttcaggtttgaaacactctttctgtaggatctgcaagtggctatttggaccactctgtggccttcgttcgaaacgggtatatcttcgcataaaatctagacagaagcattctcagaaaatactttgtgatgattgagtttaaatcacagagctgaccattcctttggatggagcaggtttgagacacactttttgtagaatctacaagtggatatttggacctctctgaggatttcgttggaaacgggataactgcacctaactaaacggaagcattctcagaaactgctttgtgatgattgcattcacctcacagagttgaacattcctattgatagagcagtttggaaacactcttgttgtggaatgtgcaagtggagatttggagcgctttgaggcctatggtagtaaagggaatagcttcatagaaaaactagacagatgcattctcaggaaccttttggtgatgtttgtattcaactcccagagttgaactttcctttggaaagagcagctatgaaacactctttttctagaatctgcaagtggacgtttggagggctttgtggtttgtggtggaaaaggaaatatcttcacctaaatactagatagaagcattctcagaagcttctctgtgatgactgcattcaactcacggagttgaacactccttttgagagcgcagttttgaaactctctttctgtggcatctgcaaggggacatgtagacctctttgaagatttcgttggaaacggaatcatcttcacataaaaactatacagaagcagtctcagaatcttctttgtgatgtttgcattcaaatcccagagttgaactttcctttcaaagttcacgtttgaaacactctttttgcaggatctacaagtggatatttggaccactctgtgtccttcgttcgaaacgggtatatcttcacacgacatctagacagaagctttctcagaaaattctttgggatgattgagtggaactcacagagctgaacattccttgcgatgtagcagtttagaaacacactttctgcagaatctgcaagtgcatatttggacctctctgaggaattcgttggaaacgggataatttcagctgactaaacagaagcattctcagaaccttcttcgtgatgtctgcattcaactcacagtgtggaacctttctttgatagttcaggtttgaaacactctttttgtagaaactgcaaggggataattgcacttctttgaggcctaccgtagtaaaggaaataacttcctatagaaagaagacagaagcattctcaaaaccctctttgtgatgtttgcattcaactcacagagctgaacctttctttgatagttcagctttgaaacactcttcttgtagaaactgcaagtggatatttggtcctctctgaggatttcgttggaaacgggataaaccgcacagaactaaacagaagcattctcagaaccttcttcgtgatgtttgcattcaactcacagtgttgaacctttctttgatagttcaggtttgaaacggtctttctgtagaaactgcaagtagatatttggacctctctgaggatttcgttggaaacgggataacccgcacagaactaaaacagaagcattcacagaaaactcttggtgacgactgagtttaactcacagagctgaacatccctttggatggagtagtttcgaaacacactatttgtagaatgtgcaagtggatatttgggcctctctgaggatttcgttggaaacgggataaaccgcacagaactaaacagaagcattctcagaaactactttgtgatgattgcattcaagtcacagagttgaacattccctttgacagagcagtttggaaactctctttgtgtagaatctgcaagtggagatatggaccgctttgaggcctatggtagtaaaggaaatagcttcatataaaagctagacagtagcattctcagaaacttctttgtgatgcttgcattcaactcacagagttgaactttcctttcgagagagaagctttgaaacactctttttccagaatctgcaagtggacatttggagggctttgaggcctgtggtggaaaaggaattatcttcccgtaaaagctagatagaagcattgtcagaaacttctttgtgatgattgcattcaactcacaggagttgaaggttccttttcaaacagcagtttccaatcactctttctgtggaatctgcaagtggatatttcgacctctttgaagatttcgttggaaacgggagaatcttcacagaaaagctaaacagaagcattctcagaaacttctctgtgatgtttgtgttcaactcccagagtttcacgttgcttttcatagagtagttctgaaacatgcttttcgtagtgtctgcaagtggacatttggagcgctttcaggcctgtggtggaaaacgaattatggtcacataaaaactggagagaagccttctcagaaacttctctgtgatgattgcattcaactcacagagttgaaccctcctatggatagagcagtgttgaaactctctttttgtggaatctgcaagtggatatgtggacctctccgaagatgtctttggaaacgggaatatcttcacataaaaactaaacagaagcattctcagaaacttcttggtgatgtttgcattcaaatcccagcagttgaaccttcctttgatagttcaggtttgaaacactctttctgtaggatctgcaagtggctatttggaccactctgtggccttcgttcgaaacgggtatatcttcgcataaaatctagacagaagcattctcagaaaatactttgtgatgattgagtttaaatcacagagctgaccattcctttggatggagcaggtttgagacacactttttgtagaatctacaagtggatatttggacctctctgaggatttcgttggaaacgggataactgcacctaactaaacggaagcagcattctcagaaactgctttgtgatgattgcattcacctcacagagttgaacattcctattgatagagcagtttggaaacactcttgttgtggaatgtgcaagtggagatttggagcgctttgaggcctgtggtagtaaagggaatagcttcatagaaaaactagacagatgcattctcaggaactttttggtgatgtttgtattcaactcccagagttgaactttcctttggaaagagcagctatgaaacactctttttctagaatctgcaagtggacgtttggagggctttgtggtttgtggtggaaaaggaaatatcttcacctaaatactagatagaagcattctcagaagcttctctgtgatgactgcattcaactcacggagttgaacactccttttgagagcgcagtttttaaactctctttctgtggcatctgcaaggggacatgtagacctctttgaagatttcgttggaaacggaatcatcttcacataaaaactatacagaagcagtctcagaatcttctttgtgatgtttgcattcaaatcccagagttgaactttcctttcaaagttcacgtttgaaacactctttttgctggatctacaagtggatatttggaccactctgtgtccttcgttcgaaacgggtatatcttcacatgacatctagacagaagctttctcagaaaattctttgggatgattgagtggaactcacagagctgaacattccttgcgatgtagcagtttagaaacacactttctgcagaatctgcaagtgcatatttggacctctctgaggaattcgttggaaacgggataatttcagctgactaaacagaagcattctcagaaccttcttcgtgatgtctgcattcaactcacagtgtggaacctttctttggtagttgaggtttgaaacactctttttgtagaaactgcaaggggataattgcacttctttgaggcctaccgtagtaaaggaaataacttcctatagaaagaagacagaagcattctcagaaccctcttcgtgatgtttgcattcaactcacagtgctgaacctttctttgatagttcagctttgaaacactcttcttgtagaaactgcaagtggatatttggtcctctctgaggatttctttgtaaacgggataaaccgcacagaactaaacagaagcattctcagaaccttcttcgtgatgtttgcattcaacacacagtgttgaacctttctttgatagttcaggttggaaacggtctttctgtagaaactgcaagtagatatttggacctctctgaggatttcgttggaaacgggataaaccgcacagaactaaaacagaagcattcacagaaaactcttggtgacgactgagtttaactcacagagctgaacattcctttggatggagcagtttcgaaacacactatttgtagaatctgcaagtggatatgtgggcctctctgaggatttctttggaaacgggataaaccgcacagaactaaaacagaagcattctcagaaactacttggtgatgattgcattcaagtcacagagttgaacattccctttgacagaacactttggaaactctggttgtgtagaatctgcaagtggagatatggaccgctttgaggcctatggtagtaaaggaaatagcttcatataaaaactagacagtagcattgtcagaaacttctttgtgatgtttgcattctactcacagagttgaactttccttttgagagagaagctttgaaacactctttctctagaatctgcaagtggatatttggagggctttgaggcctgtggtggaaaaggaattaacttcccgtaaaaactagatagaagcattgtcagaaacttctttgtgatgattgcattcaactcacagagttgaaggttcctttccaaacagcagtttccaaacactctttctgtggaatctgcaagtggatatttggacctctttgaagatttcgttggaaacgggagaatcttcacagaaacgctaaacagaagcattctcagaaacttctctgtgatgtttgtgttcaactcccagagtttcacattgcttctcatagagtagttctgaaacatgcttttcgtagtgtctgcaagtggtcatttggagcgctttcaggcctgtggtggaaaacgaattatggtcacataaaaactggagagaagccttctcagaaacttctctgtgatgattgcattcaactcacagagttgaaccctcctatggatagagcagtgttgaaactctctttttgtggaatctgcaagtggatatgtggacgtctccgaagatgtctttggaaacgggaatatcttcacataaaaactaaacagaagcattctcagaaacatcttggtgatgtttgcattcaaatcccagagttgaaccttccctttgatagttcaggtttgaaacactctttttgtaggatctgcaagtggatatttggaccactctgtggccttcgttcgaaacgggtacatcttcgcataaaatctagacagaagcattctcagaaaatactttgtgatgattgagttgaactcacagagctgaacattcctttggatggagcaggtttgagacacactttttgtagaatctacacgtggatatttggacctctctgaggatttcgttggaaacgggataactgcacctaactaaacggaagcattctcagaaactgctttgtgatgattgcattcacctcacagagttgaacattcctattgatagagcagtttggaaacactcttgttgtggaatgtgcaagtggagattcggagcgctttgaggcctatggtagtaaagggaatagcttcatagaaaaactagacagatgcattgtcaggaactttttggtgatgtttgtattcaactcccggagttgaactttcctttggaaagagcagctatgaaacactctttttctagaatctgcaagtggacgtttggagggctttgtggtttgtggtggaaaaggaaatatcttcacctaaatactagatagaagcattctcagaagcttctctgtgatgactgcattcaactcacggagttgaacactccttttgagagcgcagttttgaaactctctttctgtggcatctgcaaggggacatgtagacctctttgaagatttcgttggaaacggaatcatcttcacataaaaactatacagaagcagtctcagaatcttctttgtgatgtttgcattcaaatcccagagttgaactttcctttcaaagttcacgtttgaaacactctttttgcaggatctacaagtggatatttggaccactctgtgtccttcgttcgaaacgggtatatcttcacacgacatctagacagaagctttctcagaaaattctttgggatgattgagtggaactcacagagctgaacattccttgcgatgtagcagtttagaaacacactttctgcagaatctgcaagtgcatatttggacctctctgaggaattcgttggaaacgggataatttcagctgactaaacagaagcattctcagaaccttcttcgtggtgtctgcattcaactcacagtgtggaacctttctttgatagttcaggtttgaaacactctttttgtagaaactgcaaggggataattgcacttctttgaggcctaccgtagtaaaggaaataacttcctatagaaagaagacagaagcattctcagaaccctcttcgtgatgtttgcattcaactcacagtgctgaacctttctttgatagttcagctttgaaacactcttcttgtagaaactgcaagtggatatttggtcctctctgaggatttcgttggaaacgggataaaccgcacagaactaaacagaagcattctcagaaccttcttcgtgatgtttgcattcaactcacagtgttgaacctttctttgatagttcaggttggaagcggtctttctgtagtaactgcaagtagatatttggacctctctgaggatttcgttggaaacgggataaaccgcacagaactaaaacagaagcattcacagaaaactcttggtgacgactgagtttaactcacagagctgaacattcctttggatggagcagtttcgaaacacactatttgtagaatgtgcaagtggatatttgggcctctctgaggatttcgttggaaacgggataaaccgcacagaactaaacagaagcattctcagaaactactttgtgatgattgcattcaagtcacagagttgaacattccctttgacagagcagtttggaaactctctttgtgtagaatctccaagtggagatatggaccgctttgaggcctatggtagtaaaggaaatagcttcatataaaagctagacagtagcattctcagaaacttctttgtgatgcttgcattcaactcacagagttgaactttcctttcgagagagaagctttgaaacactctttttccagaatctgcaagtggacatttggagggctttgaggcctgtggtggaaaaggaattaacttcccgtaaaagctagatagaagcattgtcagaaacttctttgtgatgattgcattcaactcacagagatgaaggttcctttacaaacagcagtttccaaacactctttctgtggaatctgcaagtggatatttggacctctttgaagatttcgttggaaacgggagaatcttcacagaaaagctaaacagaagcattctcagaaacttctctgtgatgtttgtgttcaactcccagagtttcacattgcttttcatagagtagttctgaaacatgcttttcgtagtgtctgcaagtggacatttggagcgctttcaggcctgtggtgcaaaacgaattatggtcccataaaaactggagagaagccttctcagaaacttctctgtgatgattgcattcaactcacagatttgaaccctcctatggatagagcattgttgaaactctctttttgtggaatctgcaagtggatatgtggacctctccgaagatgtctttggaaacgggaatatcttcacataaaaactaaacagaagcattctcagaaacttcttggtgatgtttgcattcaaatcccagagttgaaccttcctgtgatagttcaggtttgaaacactctttttgtaggatctgcaagtggatatttggaccactctgtggccttcgttcgaaacggtacatcttcacataaaatctagacagaagcattctcagaaaatactttgtgatgattgagttgaaatcacagagctgaacattcctttggatggagcaggtttgagacacactttttgtagaatctacaagtggatatttggacctctctgaggatttcgttggaaacgggataactgcacctaactaaacggaagcattctcagaaactgctttgtgatgattgcattcacctcacagagttgaacattcctattgatagagcagtttggaaacactcttgttgtggaatgtgcaagtggagatttggagcgctttgaggcctatggtagtaaagggaatagcttcatagaaaaactagacagatgcattctcaggaaccttttggtgatgtttgtattcaactcccagagttgaactttcctttggaaagagcagctatgaaacactctttttctagaatctgcaagtggacgtttggagggctttgtggtttgtggtggaaaaggaaatatcttcacctaaatactagatagaagcattctcagaagcttctctgtgatgactgcattcaactcacggagttgaacactccctttgagagcgcagttttgaaactctctttctgtggcatctgcaaggggacatgtagacctctttgaagatttcgttggaaacggaatcatcttcacataaaaactatacagaagcagtctcagaatcttctttgtgatgtttgcattcaaatcccagagttgaactttcctttcaaagttcacgtttgaaacactctttttgcaggatctacaagtggatatttggaccactctgtgtccttcgttcgaaacgggtatatcttcacacgacatctagacagaagctttctcagaaaattctttgggatgattgagtggaactcacagagctgaacattccttgcgatgtagcagtttagaaacacactttctgcagaatctgcaagtgcatatttggacctctctgaggaattcgttggaaacgggataatttcagctgactaaacagaagcattctcagaaccttcttcgtgatgtctgcattcaactcacagtgtggaacctttctttgatagttcaggtttgaaacactctttttgtagaaactgcaaggggataattgcacttctttgaggcctaccgtagtaaaggaaataacttcctatagaaagaagacagaagcattctcagaaccctcttcgtgatgtttgcattcaactcacagtgctgaacctttctttgatagttcagctttgaaacactcttcttgtagaaactgcaagtggatatttggtcctctctgaggatttcgttggaaacgggataaaccgcacagaactaaacagaagaattctcagagccctcttcgtgatgtttgcattcaactcacagtgctgaacctttctttgatagtgcagctttgaaacactctttttgtagaaactgcaagtggatgtttggtcctctctgaggatttcgttggaaacgggataaaccgcacagaactaaaacagaagcattgtcagaaacttctttgtgatgattgcattcaactcacagagttgaaggttccttttcaaacagcagtttccaatcactctttctgtggaatctgcaagtggatatttgggcctctctgaggatttcgttggaaacgggataaaacgcacagaactaaaacagaagcattctcagaaacttctctgtgatgtttgtgttcaactcccagagtttcacgttgcttttcatagagtagttctgaaacatgcttttcgtagtgtctgcaagtggacatttggagcgctttcaggcctgtggtggaaaacgaattatggtcacataaaaactggagagaagccttctcagaaacttctctgtgatgattgcattcaactcacagagttgaaccctcctatggatagagcagtgttgaaactctctttttgtggaatctgcaagtggatatgtggacctctccgaagatgtctttggaaacgggaatatcttcacataaaaactaaacagaagcattctcagaaacttcttggtgatgtttgcattcaaatcccagagttgaaccttcctttgatagttcaggtttgaaacactctttttgtaggatctgcaagtggctatttggaccactctgtggccttcgttcgaaacgggtatatcttcgcataaaatctagacagaagcattctcagaaaatactttgtgatgattgagtttaactcacagagctgaacattcctttggatggagcaggtttgagacacactttttgtagaatctacaagtggatatttgcacctctctgaggatttcgttggaaacgggataactgcacctaactaaacggaagcattctcagaaactgctttgtgatgattgcattcacctcacagagttgaacattcctattgatagagcagtttggaaacactcttgttgtggaatgtgcaagtggagatttggagtgctttgaggcctatggtagtaaagggaatagcttcatagaaaaactagacagatgcattctcaggaactttttggtgatgtttgtattcaactcccagagttgaactttcctttggaaagagcagctatgaaacactctttttctagaatctgcaagtggacgtttggagggctttgtggtttgtggtggaaaaggaaatatcttcacctaaatactagatagaagcattctcagaagcttctctgtgatgactgcattcaactcacggagttgaacactccttttgagagcgcagttttgaaactctctttctgtggcatctgcaaggggacatgtagacctctttgaagatttcgttggaaacggaatcatcttcacataaaaactatacagaagcagtctcagaatcttctttgtgatgtttgcattcaaatcccagagttgaactttcctttcaaagttcacgtttgaaacactctttttgcaggatctacaagtggatatttggaccactctgtgtccttcgttcgaaacgggtatatcttcacacgacatctagacagaagctttctcagaaaattctttgggatgattgagtggaactcacagagctgaacattccttgcgatgtagcagtttagaaacacactttctgcagaatctgcaagtgcatatttggacctctctgaggaattcgttggaaacgggataatttcagctgactaaacagaagcattctcagaaccttcttcgtgatgtctgcattcaactcacagtgtggaacctttctttgatagttcaggtttgaaacactctttttgtagaaactgcaaggggataattgcacttctttgaggcctaccgtagtaaaggaaataacttcctatagaaagaagacagaagcattctcagaaccctcttcgtgatgtttgcattcaactcacagtgctgaacctttctttgatagttcagctttgaaacactcttcttgtagaaactgcaagtggatatttggtcctctctgaggatttcgttggaaacgggataaaccgcacagaactaaacagaagaattctcagagccctcttcgtgatgtttgcattcaactcacagtgctgaacctttctttgatagtgcagctttgaaacactctttttgtagaaactgcaagtggatgtttggtcctctctgaggatttcgttggaaacgggataaaccgcacagaactaaaacagaagcattgtcagaaacttctttgtgatgattgcattcaactcacagagttgaaggttccttttcaaacagcagtttccaatcactctttctgtggaatctgcaagtggatatttgggcctctctgaggatttcgttggaaacgggataaaacgcacagaactaaaacagaagcattctcagaaacttctctgtgatgtttgtgttcaactcccagagtttcacgttgcttttcatagagtagttctgaaacatgcttttcgtagtgtctgcaagtggacatttggagcgctttcaggcctgtggtggaaaacgaattatggtcacataaaaactggagagaagccttctcagaaacttctctgtgatgattgcattcaactcacagagttgaaccctcctatggatagagcagtgttgaaactctctttttgtggaacctgcaagtggatatgtggacctctccgaagatgtctttggaaacgggaatatcttcacataaaaactaaacagaagcattctcagaaacttcttggtgatgtttgcattcaaatcccagagttgaaccttcctttgatagttcaggtttgaaacactctttctgtaggatctgcaagtggctatttggaccactctgtggccttcgttcgaaacgggtatatcttcgcataaaatctagacagaagcattctcagaaaatactttgtgatgattgagtttaaatcacagagctgaccattcctttggatggagcaggtttgagacacactttttgtagaatctacaagtggatatttggacctctctgaggatttcgttggaaacgggataactgcacctaactaaacggaagcattctcagaaactgctttgtgatgattgcattcacctcacagagttgaacattcctattgatagagcagtttggaaacactcttgttgtggaatgtgcaagtggagatttggagcgctttgaggcctgtggtagtaaagggaatagcttcatagaaaaactagacagatgcattctcaggaactttttggtgatgtttgtattcaactcccagagttgaactttcctttggaaagagcagctatgaaacactctttttctagaatctgcaagtggacgtttggagggctttgtggtttgtggtggaaaaggaaatatcttcacctaaatactagatagaagcattctcagaagcttctctgtgatgactgcattcaactcacggagttgaacactccttttgagagcgcagttttgaaactctctttctgtggcatctgcaaggggacatgtagacctctttgaagatttcgttggaaacggaatcatcgtcacataaaaactatacagaagcagtctcagaatcttctttgtgatgtttgcattcaaatcccagagttgaactttcctttcaaagttcacgtttgaaacactctttttgcaggatctacaagtggatatttggaccactctgtgtccttcgttcgaaacgggtatatcttcacacgacatctagacagaagctttctcagaaaattctttgggatgattgagtggaactcacagagctgaacattccttgcgatgtagcagtttagaaacacactttctgcagaatctgcaagtgcatatttggacctctctgaggaattcgttggaaacgggataatttcagctgactaaacagaagcattctcagaaccttcttcgtgatgtctgcattcaactcacagtgtggaacctttctttgatagttcaggtttgaaacactctttttgtagaaactgcaaggggataattgcacttctttgaggcctaccgtagtaaaggaaataacttcctatagaaagaagacagaagcattctcagaaccctcttcgtgatgtttgcattcaactcacagtgctgaacctttctttgatagttcagctttgaaacactcttcttgtagaaactgcaagtggatatttggtcctctctgaggatttcgttggaaacgggataaaccgcacagaactaaacagaagaattctcagagccctcttcgtgatgtttgcattcaactcacagtgctgaacctttctttgatagtgcagctttgaaacactctttttgtagaaactgcaagtggatgtttggtcctctctgaggatttcgttggaaacgggataaaccgcacagaactaaaacagaagcattgtcagaaacttctttgtgatgattgcattcaactcacagagttgaaggttccttttcaaacagcagtttccaatcactctttctgtggaatctgcaagtggatatttgggcctctctgaggatttcgttggaaacgggataaaacgcacagaactaaaacagaagcattctcagaaacttctctgtgatgtttgtgttcaactcccagagtttcacgttgcttttcatagagtagttctgaaacatgcttttcgtagtgtctgcaagtggacatttggagcgctttcaggcctgtggtggaaaacgaattatggtcacataaaaactggagagaagccttctcagaaacttctctgtgatgattgcattcaactcacagagttgaaccctcctatggatagagcagtgttgaaactctctttttgtggaatctgcaagtggatatgtggacctctccgaagatgtctttggaaacgggaatatcttcacataaaaactaaacagaagcattctcagaaacttcttggtgatgtttgcattcaaatcccagagttgaaccttcctttgatagttcaggtttgaaacactctttctgtaggatctgcaagtggctatttggaccactctgtggccttcgttcgaaacgggtatatcttcgcataaaatctagacagaagcattctcagaaaatactttgtgatgattgagtttaaatcacagagctgaccattcctttggatggagcaggtttgagacacactttttgtagaatctacaagtggatatttggacctctctgaggatttcgttggaaacgggataactgcacctaactaaacggaagcattctcagaaactgctttgtgatgattgcattcacctcacagagttgaacattcctattgatagagcagtttggaaacactcttgttgtggaatgtgcaagtggagatttggagcgctttgaggcctgtggtagtaaagggaatagcttcatagaaaaactagacagatgcattctcaggaactttttggtgatgtttgtattcaactcccagagttgaactttcctttggaaagagcagctatgaaacactctttttctagaatctgcaagtggacgtttggagggctttgtggtttgtggtggaaaaggaaatatcttcacctaaatactagatagaagcattctcagaagcttctctgtgatgactgcattcaactcacggagttgaacactccttttgagagcgtagttttgaaactctctttctgtggcatctgcaaggggacatgtagacctctttgaagatttcgttggaaacggaatcatcttcacataaaaactatacagaagcagtctcagaatcttctttgtgatgtttgcattcaaatccccgagttgaactttcctttcaaagttcacgtttgaaacactctttttgcaggatctacaagtggatatttggaccactctgtgtccttcgttcgaaacgggtatatcttcacatgacatctagacagaagctttctcagaaaattctttgggatgattgagttgaactcacagagctgagcattccttgcgatgtagcagtttagaaacacactttctgcagaatctgcaagtgcatatttggacctctgtgaggaattcgttggaaacgggataatttcagctgactaaacagaagcattctcagaaccttcttcgtgatgtctgcattcaactcacagtgtggaacctttctttgatagttcaggtttgaaacactctttttgtagaaactgcaaggggataattgcactctttgaggagtaccgtagtaaaggaaataacttcctataaaaagaagacagaagcattctcagaaccctcttcgtgatgtttgcattcaactcacagtgctgaaactttctttgatagttcagctttgaaacactctttttgtagaaactgcaagtggatatttggtcctctctgaggatttcgttggaaacgggataaactgcacagaactaaacagaagcattctcagaaccttcttcgtgatgtttgcattcaactcacagtgttgaacctttctttgatagttcaggtttgaaacggtctttctgtagaaactgcaagtagatatttggacctctctgaggatttcgttggaaacgggataacccgcacagaactaaaacagaagcattcacagaaaactcttggtgacgactgagtttaactcacagagctgaacattcctttggatggagcagtttcgaaacacactatttgtagaatgtgcaagtggatatttaggcctctctgaggatttcgttggaaacgggataaaccgcacagaactaaacagaagcattctcagaaactactttgtgatgattgcattcaagtcacagagttgaacattccctttgacagagcagtttggaaactctctttgtgtagaatctgcaagtggagatatggaccgctttgaggcctatggtagtaaaggaaatagcttcatataaaagctagacagtagcattctcagaaacttctttgtgatgcttgcattcaactcacagagttgaactttcctttcgagagagaagctttgaaacactctttttccagaatctgcaagtggacatttggagggctttgaggcctgtggtggaaaaggaattatcttcccgtaaaagctagatagaagcattgtcagaaacttctttgtgatgattgcattcaactcacagtagttgaaggttccttttcaaagagcagtttccaatcactctttctgtggaatctgcaagtggatatttggacctattttgaagatttcgttggaaacgggagaatcttcacaggaaagctaaacagaagcattctcagaaacttctctgtgatgtttgtgttcaactcccaggagtttcacattgcttttcatagagtagttctgaaacatgcttttcgtagtgtctacaagtggacatttggagcgccttcaggcctgtggtggaaaacgaattatggtcacataaaaactggagagaagccttctcagaaacttctctgtgatgattacattcaactcacagagttgaaccctcctatggatagagcagtgttgaaactctcttttcgtggaatctgcaagcggatatgtggacctctctgaagatgtctttggaaacgggaatatcttcacataaaaactaaacagaagcattctcagaaacttcttggtgatgtttgcattcaaatcccagagttgaaccttcctttgagagttgaggtttgaaacactctttttgtaggatctgcaagtggatatttggaccactctgtggccttcgttcgaaacgggtacatcttcgcataaaatctagacagaagcattctcagaaaatactttgtgatgattgagttgaactcacagagctgaacattcctttggatggagcaggtttgagacacactttttgtagaatctacaagtggatatttggacctctctgaggatttcgttggaaacgggataactgcacctaactaaacggaagcattctcagaaactgctttgtgatgattgcattcacctcacagagttgaacattcctattgatagagcagtttggaaacactcttgttgtggaatgtgcaagtggagatttggagcgctttgaggcctatggtagtaaagggaatagcttcatagaaaaactagacagatgcattctcaggaactttttggtgatgtttgtattcaactcccagatttgaactttcctttggaaagagcagctgtgaaacactctttttctagaatctgcaagtggacgtttggagggctttgtggtttgtggtggaaaaggaaatatcttcacctaaatagtagagagaagcattctcagaagcttctctgtgatgactgcattcaactcacggagttgaacactccttttgagagcgcagttttgaaactctctttctgtggcatctgcaaggggacatgtagacctctttgaagatttcgttggtaacggaatcatcttcacatcaaaactatacagaagcagtctcagaatcttctttgtgatgtttgcattcaaatcccagagttgaactttcctttcaaagttcacgtttgaaacactctttttgcaggatctacaagtggatatttggaccactctgtgtccttcgttcgaaacgggtatatcttcacatgacatctagacagaagctttctcagaaaattctttgggatgattgagttgaggaaacagaactgaacactccttgcgatgtagcagtttagaaacacactttctgcagaatctgcaagtgcatatgtggacctctctgaggaattcattagaaacgggataatttcagctgactaaacagaagcattctcagaaccttcttcgtgatgtctgcattcaactcacagtgtggaacctttctttgatagttcaggtttgaaacactctttttgtagaaactgcaaggggataattgcacttctttgaggcctaccgtagtaaaggaaataacttcctatagaaagaagacagaagcattctcagaaccctcttcgtgatgtttgcattcaactcacagtgctgaacctttctttgatagttcagctttgaaacactctttttgtagaaactgcaaatggatatttggtcctctctgaggatttcgttggaaaagggataaaacgcacagaactaaacagaagcattcacagaaaactcttggtgacgactgagtttaactcacagagctgaacattcctttggatggagcagtttcaaaacacactatttgtagaatgtgcaagtggatatgtgggcctctctgaggatttcgttggaaacgggataaaccgcacagaaaaaaaacagaagcattctcagaaactactttgtgatgattgcattcaagtcacagagttgaacattccctttgacagagcagtttggaaactctctttgtgtagaatctgcaagtggagatatggaccgctttgaggcctatggtagtaaaggaaatagcttcatataaaagctagacagtagcattctcagaaacttctttgtgatgcttgcattcaactcacagagttgaactttcctttcgagagagaagctttgaaacactctttttccagaatctgcaagtggacatttggagggctttgaggcctgtggtggaaaaggaattatcttcccgtaaaagctagacagaagcattgtcagaaacttctttgtgatgattgcattcaactcacagagttgaaggttccttttcaaagagcagtttccaatcactctttctgtggaatctgcaagtggatatttggacctctttgaagatttcgttggaaacgggagaatcttcacagaaaagctaaacagaagcattctcagaaacttctctgtgatgtttgtgttcaactcccagagtttcacattgcttctcatagagtagttctgaaacatgcttttcgtagtgtctgcaagtggacatttggagcgctttcaggtctgtggtggaaaacgaattatggtcacataaaaactggagagaagccttctcagaaacttctctgtgatgattgcattcaactcacagagttgaaccctcctatggatagagcattgttgaaactctctttttgtggaatctgcaagtggatatgtggacctctccgaagatgtctttggaaacgggaatatcttcacataaaaactaaacagaagcattctcagaaacttcttggtgatgtttgcattcaaatcccagagttgaaccttcctttgatagttcaggtttgaaacactctttttgtaggatctgcaagtggatatttggaccactctgtggccttcgttcgaaacgggtatatcttcgcataaaatccagacagaagcattctcagaaaatactttgtgatgattgagtttaactcacagagctgaacattcctttggatggagcaggtttgagacacacatttgtagaatctacaagtggatatttggacctctctgaggatttcgttggaaacgcgacaactgcacctaactaaacggaagcattctcagaaactgctttgtgatgattgcattcacctcacagagttgaacattcctattgatagagcagtttggaaacactcttgttgtggaatgtgcaagtggagatttggagcgctttgaggcctatggtagtaaagggaatagcttcatagaaaaactagacagatgcattctcaggaactttttggtgatgtttgtattcaactcccagagttgaactttcctttggaaagagcagctatgaaacactctttttctagaatctgcaagtggacgtttggagggctttgtggtttgtggtggaaaaggaaatatcttcacctaaatactagatagaagcattctcagaagcttctctgtgatgactgcattcaactcacggagttgaacactccttttgagagcgcagttttgaaactctctttctgtggcatctgcaaggggacatgtagacctctttgaagatttcgttggaaacggaatcatcttcacataaaaactatacagaagcagtctcagaatcttctttgtgatgtttgcattcaaatcccagagttgaactttcctttcaaagttcacgtttgaaacactctttttgcaggatctacaagtggatatttggaccactctgtgtccttcgttcgaaacgggtatatcttcacacgacatctagacagaagctttctcagaaaattctttgggatgattgagtggaactcacagagctgaacattccttgcgatgtagcagtttagaaacacactttctgcagaatctgcaagtgcatatttggacctctctgaggaattcgttggaaacgggataatttcagctgactaaacagaagcattctcagaaccttcttcgtgatgtctgcattcaactcacagtgtggaacctttctttgatagttcaggtttgaaacactctttttgtagaaactgcaaggggataattgcacttctttgaggcctaccgtagtaaaggaaataacttcctatagaaagaagacagaagcattctcagaaccctcttcgtgatgtttgcattcaactcacagtgctgaacctttctttgatagttcagctttgaaacactcttcttgtagaaactgcaagtggatatttggtcctctctgaggatttcgttggaaacgggataaaccgcacagaactaaacagaagcattcacagaaaactcttggtgacgactgagtttaactcacagagctgaacattcctttggatggagcagtttcgaaacacactatttgtagaatctgcaagtggatatttgggcctctctgaggatttcgttggaaacgggataaaccgcacagaactaaaacagaagcattctcagaaactactttgtgatgattgcattcaagtcacagagttgaacattccctttgacagagcagtttggaaactctctttgtgtagaatctgcaagtggagatatggaccgctttgaggcctatggtagtaaaggaaatagcttcatataaaagctagacagtagcattctcagaaacttctttgtgatgcttgcattcaactcacagagttgaactttcctttcgagagagaagctttgaaacactctttttccagaatctgcaagtggacatttggagggctttgaggcctgtggtggaaaaggaattatcttcccgtaaaagctagatagaagcattgtcagaaacttctttgtgatgattgcattcaactcacagagttgaaggttccttttcaaagagcagtttccaatcactctttctgtggaatctgcaagtggatatttggacctattttgaagatttcgttggaaacgggagaatcatcacaggaaagctaaacagaagcattctcagaaacttctctgtgatgtttgtgttcaactcccagagtttcacattgcttttcatagagtagttctgaaacatgcttttcgtagtgtctacaagtggacatttggagcgctttcaggcctgtggtggaaaacgaattatggtcacataaaaactggagagaagccttctcagaaacttctctgtgatgattgcattcaactcacagagttgaaccctcctatggatagagcagtgttgaaactctctttttgtggaatctgcaagtggatatgtggacctctccgaagatgtctttggaaacgggaatatcttcacataaaaactaaacagaagcattctcagaaacttcttggtgatgtttgcattcaaatcccagagttgaaccttcctttgatagttcaggtttgaaacactctttttgtaggatctgcaagtggatatttggaccactctgtggccttcgttcgaaacgggtatatcttcgcataaaatctagacagaagcattctcagaaaatactttgtgatgattgagtttaactcacagagctgaacattcctttggatggagcaggtttgagacacaccttttgtagaatctacaagtggatatttggacctctctgaggatttcgttggaaacgggataactgcacctaactaaacggaagcattctcagaaactgctttgtgatgattgcattcacctcacagagttgaacattcctattgatagagcagtttggaaacactcttgttgtggaatgtgcaagtggagatttggagcgctttgaggcctatggtagtaaagggaatagcttcatagaaaaactagacagatgcattctcaggaactttttggtgatgtttgtattcaactcccagagttgaactttcctttggaaagagcagctatgaaacactctttttctagaatctgcaagtggacgtttggagggctttgtggtttgtggtggaaaaggaaatatcttcacctaaatactagatagaagcatcctcagaagcttctctgtgatgactgcattcaactcacggagttgaacactccttttgagagcgcagttttgaaactctctttctgtggcatctgcaaggggacatgtagacctctttgaagatttcgttggaaacggaatcatcttcacataaaaactacacagaagcagtctcagaatcttctttgtgatgtttgcattcaaatccccgagttgaactttcctttcaaagttcacgtttgaaacactctttttgcaggatctacaagtggatatttggaccactctgtgtccttcgttcgaaacgggtatatcttcacatgacatctagacagaagctttctcagaaaattctttgggatgattgagttgaactcacagagctgagcattccttgcgatgtagcagtttagaaacacactttctgcagaatctgcaagtgcatatttggacctctgtgaggaattcgttggaaacgggataatttcagctgactaaacagaagcattctcagaaccttcttcgtgatgtctgcattcaactcacagtgtggaacctttctttgatagttcaggtttgaaacactctttttgtagaaactgcaaggggataattgcactctttgaggagtaccgtagtaaaggaaataacttcctataaaaagaagacagaagcattctcagaaccctcttcgtgatgtttgcattcaactcacagtgctgaacctttctttgatagttcagctttgaaacactctttttgtagaaactgcaagtggatatttggtcctctctgaggatttcgttggaaacgggataaactgcacagaactaaacagaagcattctcagaaccttcttcgtgatgtttgcattcaactcacagtgttgaacctttctttgatagttcaggtttcaaacggtctttctgtagaaactgcaagtagatatttggacctctctgaggatttcgttggaaacgggataacccgcacagaactaaaacagaagcattcacagaaaactcttggtgacgactgagtttaactcacagagctgaacattcctttggatggagcagtttcgaaacacactatttgtagaatgtgcaagtggatatttaggcctctctgaggatttcgttggaaacgggataaaccgcacagaactaaacagaagcattctcagaaactactttgtgatgattgcattcaagtcacagagttgaacattccctttgacagagcagtttggaaactctctttgtgtagaatctgcaagtggagatatggaccgctttgaggcctatggtagtaaaggaaatagcttcatataaaagctagacagtagcattctcagaaacttctttgtgatgcttgcattcaactcacagagttgaactttcctttcgagagagaagctttgaaacactctttttccagaatctgcaagtggacatttggagggctttgaggcctgtggtggaaaaggaattatcttcccgtaaaagctagatagaagcattgtcagaaacttctttgtgatgattgcattcaactcacagagttgaaggttccttttcaaagagcagtttccaatcactctttctgtggaatctgcaagtggatatttcgacctattttgaagattttgttggaaacgggataatcttcacagaaaagctaaacagaagcattctcagaaacttctctgtgatgtttgtgttcaactcccagagtttcacattgcttttcatagagtagttctgaaacatgcttttcgtagtgtctacaagtggacatttggagcgcctccaggcctgtggtggaaaacgaattatggtcacataaaaactggagagaagccttctcagaaacttctctgtgatgattgcattcaactcacagagttgaaccctcctatggatagagcagtgttgaaactctctttttgtggaatctgcaagtggatatgtggacctctccgaagatgtctttggaaacgggaatatcttcacataaaaactaaacagaagcattctcagaaacttcttggtgatgtttgcattcaaatcccagagttgaaccttcctttgatagttcaggtttgaaacactctttttgtaggatctgcaagtggctatttggaccactctgtggccttcgttcgaaactggtatatcttcgcataaaatctagacagaagcattctcagaaaatactttgtgatgattgagttctaaatcacagagctgaccattcctttggatggagcaggtttgagacacactttttgtagaatctacaagtggatatttggacctctctgaggatttcgttggaaacgggataactgcacctaactaaacggaagcattctcagaaactgctttgtgatgattgcattcacctcacagagttgaacattcgtattgatagagcagtttggaaacactcttcttgtggaatgtgcaagtggagatttggagcgctttggggcctatggtagtaaagggaatagcttcatagaaaaactagacagatgcattctcaggaactttttggtgatgtttgtattcaactcccagagttgaactttcctttggaaagagcagctatgaaacactctttttctagaatctgcaagtggacgtttggagggctttgtggtttgtggtggaaaaggaaatatcttcacctaaatactagacagaagcattctcagaagcttctctgtgatgactgcattcaactcacggagttgaacactccttttgagagcgcagttttgaaactctgtttctgtggcatctgcaaggggacatgtagacctctttgaagatttcgtaggaaacggaatcatcttcacataaaaactatacagaagcagtctcagaatcttctttgtgatgtttgcattcaaatcccagagttgaactttcctttcaaagttcacgtttgaaacactctttttgcaggatctacaagtggatatttggaccactctgtgtccttcgttcgaaacgggtatatcttcacatgacatctagacagaagctttctcagaaaattctttgggatgattgagtggagctcacagagctgaacattccttgcgatgtagcagtttagaaacacactttctgcagaatctgcaagtgcatatttggacctctctgaggaattcgttggaaacgggataatttcagctgactaaacagaagcattctcagaaccttcttcgtgatgtctgcattcaactcacagtgtggaacctttctttgatagttcaggtttgaaacactctttttgtagaaactgcaaggggataattgcacttctttgaggcctaccgtagtaaaggaaataacttcctatagaaagaagacagaagcattctcagaaccctcttcgtgatgtttgcattcaactcacagtgctgaacctttctttgatagttcagctttgaaacactcttcttgtagaaactgcaagtggatatttggtcctctctgaggatttcgttggaaacgggataaaccgcacagaactaaacagaagcattctcagagccctcttcgtgatgtttgcattcaactcacagtgctgaacctttctttgatagtgcagctttgaaacactctttttgtagaaactgcaagtggatatttggtcctctctgaggatttcgttggaaacgggataaaccgcacagaactaaaacagaagcattgtcagaaacttctttgtgatgattgcattcaactcacagtagttgaaggttccttttcaaacagcagtttccaatcactctttctgtggaatctgcaagtggatatttgggcctctctgaggatttcgttggaaacgggataaaacgcacagaactaaaacagaagcattctcagaaacttctctgtgatgtttgtgttcaactcccagagtttcacgttgcttttcatagagtagttctgaaacatgcttttcgtagtgtctgcaagtggacatttggagcgctttcaggcctgtggtggaaaacgaattatggtcacataaaaactggagagaagccttctcagaaacttctctgtgatgattgcattcaactcacagagttgaaccctcctatggatagagcagtgttgaaactctctttttgtggaatctgcaagtggatatgtggacctctccgaagatgtctttggaaacgggaatatcttcacataaaaactaaacagaagcattctcagaaacttcttggtgatgtttgcattcaaatcccagagttgaaccttcctttgatagttcaggtttgaaacactctttctgtaggatctgcaagtggctatttggaccactctgtggccttcgttcgaaacgggtatatcttcgcataaaatctagacagaagcattctcagaaaatactttgtgatgattgagtttaaatcacagagctgaccattcctttggatggagcaggtttgagacacactttttgtagaatctacaagtggatatttggacctctctgaggatttcgttggaaacgggataactgcacctaactaaacggaagcattctcagaaactgctttgtgatgattgcattcacctcacagagttgaacattcctattgatagagcagtttggaaacactcttgttgtggaatgtgcaagtggagatttggagcgctttgaggcctgtggtagtaaagggaatagcttcatagaaaaactagacagatgcattctcaggaactttttggtgatgtttgtattcaactcccagagttgaactttcctttggaaagagcagctatgaaacactctttttctagaatctgcaagtggacgtttggagggctttgtggtttgtggtggaaaaggaaatatcttcacctaaatactagatagaagcattctcagaagcttctctgtgatgactgcattcaactcacggagttgaacactccttttgagagcgcagttttgaaactctctttctgtggcatctgcaaggggacatgtagacctctttgaagatttcgttggaaacggaatcatcttcacataaaaactatacagaagcagtctcagaatcttctttgtgatgtttgcattcaaatcccagagttgaactttcctttcaaagttcacgtttgaaacactctttttgcaggatctacaagtggatatttggaccactctgtgtccttcgttcgaaacgggtatatcttcacacgacatctagacagaagctttctcagaaaattctttgggatgattgagtggaactcacagagctgaacattccttgcgatgtagcagtttagaaacacactttctgcagaatctgcaagtgcatatttggacctctctgaggaattcgttggaaacgggataatttcagctgactaaacagaagcattctcagaaccttcttcgtgatgtctgcattcaactcacagtgtggaacctttctttgatagttcaggtttgaaacactctttttgtagaaactgcaaggggataattgcacttctttgaggcctaccgtagtaaaggaaataacttcctatagaaagaagacagaagcattctcagaaccctcttcgtgatgtttgcattcaactcacagtggtgaacctttctttgatagttcagctttgaaacactcttcttgtagaaactgcaagtggatatttggtcctctctgaggatttcgttggaaacgggataaaccgcacagaactaaacagaagaattctcagagccctcttcgtgatgtttgcattcaactcacagtgctgaacctttctttgatagtgcagctttgaaacactctttttgtagaaactgcaagtggatgtttggtcctctctgaggatttcgttggaaacgggataaaccgcacagaactaaaacagaagcattgtcagaaacttctttgtgatgattgcattcaactcacagagttgaaggttccttttcaaacagcagtttccaatcactctttctgtggaatctgcaagtggatatttgggcctctctgaggatttcgttggaaacgggataaaacgcacagaactaaaacagaagcattctcagaaacttctctgtgatgtttgtgttcaactcccagagtttcacgttgcttttcatagagtagttctgaaacatgcttttcgtagtgtctgcaagtggacatttggagcgctttcaggcctgtggtggaaaacgaattatggtcacataaaaactggagagaagccttctcagaaacttctctgtgatgattgcattcaactcacagagttgaaccctcctatggatagagcagtgttgaaactctctttttgtggaatctgcaagtggatatgtggacctctccgaagatgtctttggaaacgggaatatcttcacataaaaactaaacagaagcattctcagaaacttcttggtgatgtttgcattcaaatcccagagttgaaccttcctttgatagttcaggtttgaaacactctttctgtaggatctgcaagtggctatttggaccactctgtggccttcgttcgaaacgggtatatcttcgcataaaatctagacagaagcattctcagaaaatactttgtgatgattgagtttaaaacacagagctgaccattcctttggatggagcaggtttgagacacactttttgtagaatctacaagtggatatttggacctctctgaggatttcgttggaaacgggataactgcacctaactaaacggaagcattctcagaaactgctttgtgatgattgcattcacctcacagagttgaacattcctattgatagagcagtttggaaacactcttgttgtggaatgtgcaagtggagatttggagcgctttgaggcctatggtagtaaagggaatagcttcatagaaaaactagacagatgcattctcaggaactttttggtgatgtttgtattcaactcccagagttgaactttcctttggaaagagcagctatgaaacactctttttctagaatctgcaagtggacgtttggagggctttgtggtttgtggtggaaaaggaaatatcttcacctaaatactagatagaagcattctcagaagcttctctgtgatgactgcattcaactcacggagttgaacactccttttgagagcgcagttttgaaactctctttctgtggcatctgcaaggggacatgtagacctctttgaagatttcgatggaaacggaatcatcttcacataaaaactatacagaagcagtctcagaatcttctttgtgatgtttgcattcaaatcccagagttgaactttcctttcaaagttcacgtttgaaacactctttttgcaggatctacaagtggatatttggaccactctgtgtccttcgttcgaaacgggtatatcttcacatgacatctagacagaagctttctcagaaaattctttgggatgattgagttgaactcacagagctgaacatttccttgcgatggagcagtttagaaacacactttctgcagaatctgcaagtgcatatttggacctctctgaggaattcgttggaaacgggataatttcagccgactaaacagaagcattctcagaaccttcttcgtgatgtctgcattcaactcacagtgtggaacctttctttgatagttcaggtttgaaacactctttttgtagaaactgcaaggggataattgcacttctttgaggcctaccgtagtaaaggaaataacttcctataaaaagaagacagaagcattctcagaaccctcttcgtgatgtttgcattcaactcacagtgctgaacctttctttgatagttcagctttgaaacactcttcttgtagaaactgcaagtggatatttggtcctctctgaggatttcgttggaaacgggataaaccgcacagaactaaacagaagcattctcagaaccttcttcgtgatgtttgcattcaactcacagtgttgaacctttctttgatagttcaggtttgaaacggtctttctgtagaaactgcaagtagatatttggacctctctgaggatttcgttggaaacgggataacccgcacagaactaaaacagaagcattcacagaaaactcttggtgacgactgagtttaactcacagagctgaacattcctttggatggagcagtttcgaaacacactatttgtagaatgtgcaagtggatatttgggcctctctgaggatttcgttggaaacgggataaaccgcacagaactaaacagaagcattctcagaaactactttgtgatgattgcattcaagtcacagagttgaacattccctttgacagagcagtttggaaactctctttgtgtagaatctgcaagtggagatatggaccgctttgaggcctatggtagtaaaggaaatagcttcatataaaagctagacagtagcattctcagaaacttctttgtgatgcttgcattcaactcacagagttgaactttcctttcgagagagaagctttgaaacactctttttccagaatctgcaagtggacatttggagggctttgaggcctgtggtggaaaaggaattatcttcccgtaaaagctagatagaagcattgtcagaaacttctttgtgatgattgcattcaactcacagggttgaaggttccttttcaaagagcagtttccaatcactctttctgtggaatctgcaagtggatatttggacctctttgaagatttcgttggaaacgggagaatcttcacaggaaagctaaacagaagcattctcagaaacttctctgtgatgtttgtgttcaactcccagagtttcacattgcttttcatagagtagttctgaaacatgcttttcgtagtgtctacaagtggacatttggagcgctttcaggcctgtggtggaaaacgaattatggtcacataaaaactggagagaagccttctcagaaacttctctgtgatgattgcattcaactcacagagttgaaccctcctatggatagagcagtgttgaaactctctttttgtggaatctgcaagtggatatgtggacctctccgaagatgtctttggaaacgggaatatcttcacataaaaactaaacagaagcattctcagaaacttcttggtgatgtttgcattcaaatcccagagtcgaaccttcctttgatagttcaggtttgaaacactctttttgtaggatctgcaagtggatatttggaccactctgtggccttcgttcgaaacgggtatatcttcgcataaaatctagacagaagcattctcagaaaatactttgtgatgattgagtttaactcacagagctgaacattcctttggatggagcaggtttgagacacactttttgtagaatctacaagtggatatttggacctctctgaggatttcgttggaaacgggttaactgcacctaactaaacggaagcattctcagaaactgctttgtgatgattgcattcacctcacagagttgaacattcctattgatagagcagtttggaaacactcttgttgtggaatgtgcaagtggagatttggagcgctttgaggcctatggtagtaaagggaatagcttcatagaaaaactagacagatgcattctcaggaactttttggtgatgtttgtattcaactcccagagttgaactttcctttggaaagagcagctatgaaacactctttttctagaatctgcaagtggacgtttggagggctttgtggtttgtggtggaaaaggaaatatcttcacctaaatactagatagaagcattctcagaagcttctctgtgatgactgcattcaactcacggagttgaacactccttttgagagcgcagttttgaaactctctttctgtggcatctgcaaggggacatgtagacctctttgaagatttcgttggaaacggaatcatcttcacataaaaactatacagaagcagtctcagaatcttctttgtgatgtttgcattcaaatcccagagttgaactttcctttcaaagttcacgtttgaaacactctttttgcaggatctacaagtggatatttggaccactctgtgtcctttgttcgaaacgggtatatcttcacacgacatctagacagaagctttctcagaaaattctttgggatgattgagtggaactcacagagctgaacattccttgcgatgtagcagtttagaaacacactttctgcagaatctgcaagtgcatatttggacctctctgaggaattcgttggaaacgggataatttcagctgactaaacagaagcattctcagaaccttcttcgtgatgtctgcattcaactcacagtgtggaacctttctttgatagttcaggtttgaaacactctttttgtagaaactgcaaggggataattgcacttctttgaggcctaccgtagtaaaggaaataacttcctatagaaagaagacagaagcattctcagaaccctcttcgtgatgtttgcattcaactcacagtgctgaacctttctttgatagttcagctttgaaacactcttcttgtagaaactgcaagtggatatttggtcctctctgaggatttcgttggaaacgggataaaccgcacagaactaaacagaagaattctcagagccctcttcgtgatgtttgcattcaactcacagtgctgaacctttctttgatagtgcagctttgaaacactctttttgtagaaactgcaagtggatgtttggtcctctctgaggatttcgttggaaacgggataaaccgcacagaactaaaacagaagcattgtcagaaacttctttgtgatgattgcattcaactcacagagttgaaggttccttttcaaacagcagtttccaatcactctttctgtggaatctgcaagtggatatttgggcctctctgaggatttcgttggaaacgggataaaacgcacagaactaaaacagaagcattctcagaaacttctctgtgatgtttgtgttcaactcccagagtttcacgttgcttttcatagagtagttctgaaacatgcttttcgtagtgtctgcaagtggacatttggagcgctttcaggcctgtggtggaaaacgaattatggtcacataaaaactggagagaagccttctcagaaacttctctgtgatgattgcattcaactcacagagttgaaccctcctatggatagagcagtgttgaaactctctttttgtggaatctgcaagtggatatgtggacctctccgaagatgtctttggaaacgggaatatcttcacataaaaactaaacagaagcattctcagaaacttcttggtgatgtttgcattcaaatcccagagttgaaccttcctttgatagttcaggtttgaaacactctttctgtaggatctgcaagtggctatttggaccactctgtggccttcgttcgaaacgggtatatcttcgcataaaatctagacagaagcattctcagaaaatactttgtgatgattgagtttaaatcacagagctgaccattcctttggatggagcaggtttgagacacactttttgtagaatctacaagtggatatttggacctctctgaggatttcgttggaaacgggataactgcacctaactaaacggaagcattctcagaaactgctttgtgatgattgcattcacctcaccagagttgaacattcctattgatagagcagtttggaaacactcttgttgtggaatgtgcaagtggagatttggagcgctttgaggcctatggtagtaaagggaatagcttcatagaaaaactagacagatgcattctcaggaactttttggtgatgtttgtattcaactcccagagttgaactttcctttggaaagagcagctatgaaacactctttttctagaatctgcaagtggacgtttggagggctttgtggtttgtggtggaaaaggaaatatcttcacctaaatactagatagaagcattctcagaagcttctctgtgatgactgcattcaactcacggagttgaacactccttttgagagcgcagttttgaaactctctttctgtggcatctgcaaggggacatgtagacctctttgaagatttcgttggaaacggaatcatcttcacataaaaactatacagaagcagtctcagaatcttctttgtgatgtttgcattcaaatcccagagttgaactttcctttcaaagttcacgtttgaaacactctttttgcaggatctacaagtggatatttggaccactctgtgtccttcgttcgaaacggttatatcttcacaagacatctagacagaagctttctcagaaaattctttgggatgattgagtggaactcacagatctgaacattccttgcgatgtagcagtttagaaacacactttctgcagaatctgcaagtgcatatgtggacctctttgaggaattcgttggaaacgggataatttcagctgactaaacagaagcattctcagaaccttcttcgtgatgtctgcattcaactcacagtgtggaacctttctttgatagttcaggtttgaaacactctttttgtagaaactgcaaggggataattgcacttctttgaggcctaccgtagtaaaggaaataacttcctatagaaagaagacagaagcattctcagaatcttcttcgtgatgtttgcattcaactcacagtgctgaacctttctttgatagttcagctttgaaacactcttcttgtagaaactgcaagtggatatttggtcctctctgaggatttcgttggaaacgggataaaccgcacagaactaaacagaagcattctcagaaccttcttcgtgatgtttgcattcaactcacagtgttgaacctttctttgatagttcaggttggaaacggtctttctgtagaaactgcaagtagatatttggacctctctgaggatttcattggaaacgggataaaccgcacagaactaaaacagaagtattcacagaaaactcttggtgacgactgagtttaactcacagagctgaacatccctttggatggagcagtttggaaacacactatttgtagaatgtgcaagtggatattggggcctctctgaggatttcgttggaaacgggataaaccgcacagaactaaacagaagcattctcagaaactactttgtgatgattgcattcaagtcacagagttgaacattccctttgacagagcagtttggaaactctctttgtgtagaatctgcaagtggagatatggaccgctttgaggactatggtagtaaaggaaatagcttcatataaaagctagacagtagcattctcagaaacttctttgtgatgcttgcattcaactcacagagttgaactttcctttcgagagagaagctttgaaacactctttttccagaatctacaagtggacatttggagggctttgaggcctgtggtggaaaaggaattatcttcccgtaaaagctagatagaagcattgtcagaaacttctttgtgatgattgcattcaactcacagagttgaaggttccttttcaaacagcagtttccaatcactctttctgtggaatctgcaagtggatatttgggcctctctgaggatttcgttggaaacgggataaaacgcacagaactaaaacagaagcattctcagaaacttctctgtgatgtttgtgttcaactcccagagtttcacgttgcttttcatagagtagttctgaaacatgcttttcgtagtgtctgcaagtggacatttggagcgctttcaggcctgtggtggaaaacgaattatggtcacataaaaactggagagaagccttctcagaaacttctctgtgatgattgcattcaactcacagagttgaaccctcctatgggtagagcagtgttgaaactctctttttgtggaatctgcaagtggatatgtggacctctccgaagatgtctttggaaacgggaatatcttcacataaaaactaaacagaagcattctcagaaacttcttggtgatgtttgcattcaaatcccagagttgaaccttcctttgatagttcaggtttgaaacactctttctgtaggatctgcaagtggctatttggaccactctgtggccttcgttcgaaacgggtatatcttcgcataaaatctagacagaagcattctcagaaaatactttgtgatgattgagtttaaatcacagagctgaccattcctttggatggagcaggtttgagacacactttttgtagaatctacaagtggatatttggacctctctgaggatttcgttggaaacgggataactgcacctaactaaacggaagcattctcagaaactgctttgtgatgattgcattcacctcacagagttgaacattcctattgatagagcagtttggaaacactcttgttgtggaatgtgcaagtggagatttggagcgctttgaggcctgtggtagtaaagggaatagcttcatagaaaaactagacagatgcattctcaggaacttctttttggtgatgtttgtattcaactcccagagttgaactttcctttggaaagagcagctatgaaacactctttttctagaatctgcaagtggacgtttggagggctttgtggtttgtggtggaaaaggaaatatcttcacctaaatactagatagaagcattctcagaagcttctctgtgatgactgcattcaactcatggagttgaacactccttttgagagcgcagttttgaaactctctttctgtggcatctgcaaggggacatgtagacctctttgaagatttcgttggaaacggaatcatcttcacataaaaactatacagaagcagtctcagaatcttctttgtgatgtttgcattcaaatcccagagttgaactttcctttcaaagttcacgtttgaaacactctttttgcaggatctacaagtggatatttggaccactctgtgtccttcgttcgaaacgggtataacttcacacgacatctagacagaagctttctcagaaaattctttgggatgattgagtggaactcacagagctgaacattccttgcgatgtagcagtttagaaacacactttctgcagaatctgcaagtgcatatttggacctctctgaggaattcgttggaaacgggataatttcagctgactaaacagaagcattctcagaaccttcttcgtgatgtctgcattcaactcacagtgtggaacctttctttgatagttcaggtttgaaacactctttttgtagaaactgcaaggggataattgcacttctttgaggcctaccgtagtaaaggaaataacttcctatagaaagaagacagaagcattctcagaaccctcttcgtgatgtttgcattcaactcacagtgctgaacctttctttgatagttcagctttgaaacactcttcttgtagaaactgcaagtggatatttggtcctctctgaggatttcgttggaaacgggataaaccgcacagaactaaacagaagcattcacagaaaactcttggtgacgactgagtttaactcacagagctgaacattcctttggatggagcagtttcgaaacacactatttgtagaatctgcaagtggatatttgggcctctctgaggatttcgttggaaacgggataaaccgcacagaactaaaacagaagcattctcagaaactactttgtgatgattgcattcaagtcacagagttgaacattccctttgacagagcagtttggaaactctctttgtgtagaatctgcaagtggagatatggaccgctttgaggcctatggtggtaaaggaaatagcttcatataaaagctagacagtagcattctcagaaacttctttgtgatgcttgcattcaactcacagagttgaactttcctttcgagagagaagctttgaaacactctttttccagaatctgcaagtggacatttggagggctttgaggcctgtggtggaaaaggaattatcttcccgtaaaagctagatagaagcattgtcagaaacttctttgtgttgattgcattcaactcacagagttgaaggttccttttcaaacagcagtttccaatcactctttctgtggaatctgcaagtggatatttcgaccgctttgaagatttcgttggaaacgggagaatcttcacagaaaagctaaacagaagcattctcagaaacttctctgtgatgtttgtgttcaactcccagagtgtcacattgcttctcatagagtagttctgaaacatgcttttcgtagtgtctgcaaggggacatttggagcgctttcaggactgtggtggaaaacgaattatggtcacataaaaactggagagaagccttctcagaaacttctctgtgatgattgcattcaactcacagagttgaactctcctatggatagagcagtgttgaaactctctttttgtggaatctgcaagtggatatgtggacctctccgaagatgtctttggaaacgggactatcttcacataaaaactaaacagaagcattctcagaaacttcttggtgatgtttgcattcaaatcccagagttgaaccttcctttgatagttcaggtttgaaacactctttttgtaggatctgcaagtggatatttggaccactctgtggccttcattcgaaacgggtacatcttcgcataaaatctagacagaagcattctcagaaaatactttgtgatgattgagtttaactcacagagctgaacattcctttggatggagcaggtttgagacacaccttttgtagaatctacaagtggatatttggacctctcctgaggatttcgttggaaacgggataactgcacctaactaaacggaagcattctcagaaactgctttgtgatgattgcattcacctcacagagttgaacattcctattgatagagcagtttggaaacactcttgttgtggaatgtgcaagtggagatttggagcgctttgaggcctatggtagtaaagggaatagcttcatagaaaaactagacagatgcattctcaggaactttttggtgatgtttgtattcaactcccagagttgaactttcctttggaaagagcagctatgaaacactgtttttctagaatctgcaagtggacgtttggagggctttgtggtttgtggtggaaaaggaaatatcttcacctaaatactagatagaagcatcctcagaagcttctctgtgatgactgcattcaactcacggagttgaacactccttttgagagcgcagttttgaaactctctttctgtggcatctgcaaggggacatgtagacctctttgaagatttcgttggaaacggaatcatcttcacataaaaactatacagaagcagtctcagaatcttctttgtgatgtttgcattcaaatccccgagttgaactttcctttcaaagttcacgtttgaaacactctttttgcaggatctacaagtggatatttggaccactctgtgtccttcgttcgaaacgggtatatcttcacatgacatctagacagaagctttctcagaaaattctttgggatgattgagttgaactcacagagctgagcattccttgcgatgtagcagtttagaaacacactttctgcagaatctgcaagtgcatatttggacctctgtgaggaattcgttggaaacgggataatttcagctgactaaacagaagcattctcagaaccttcttcgtgatgtctgcattcaactcacagtgtggaacctttctttgatagttcaggtttgaaacactctttttgtagaaactgcaaggggataattgcactctttgaggagtaccgtagtaaaggaaataacttcctataaaaagaagacagaagcattctcagaaccctcttcgtgatgtttgcattcaactcacagtgctgaacctttctttgatagttcagctttgaaacactctttttgtagaaactgcaagtggatatttggtcctctctgagcatttcgttggaaacgggataaactgcacagaactaaacagaagcattctcagaaccttcttcgtgatgtttgcattcaactcacagtgttgaacctttctttgatagttcaggtttgaaacggtctttctgtagaaactgcaagtagatatttggacctctctgaggatttcgttggaaacgggataacccgcacagaactaaaacagaagcattcacagaaaaactcttggtgacgactgagtttaactcacagagctgaacattcctttggatggagcagtttcgaaacacactatttgtagaatgtgcaagtggatatttaggcctctctgaggatttcgttggaaacgggataaaccgcacagaactaaacagaagcattctcagaaactactttgtgatgattgcattcaagtcacagagttgaacattccctttgacagagcagtttggaaactctctttgtgtagaatctgcaagtggagatatggaccgctttgaggcctatggtagtaaaggaaatagcttcatataaaagctagacagtagcattctcagaaacttctttgtgatgcttgcattcaactcacagagttgaactttcctttcgagagagaagctttgaaacactctttttccagaatctgcaagtggacatttggagggctttgaggcctgtggtggaaaaggaattatcttcccgtaaaagctagatagaagcattgtcagaaacttctttgtgatgattgcattcaactcacagagttgaaggttccttttcaaagagcagtttccaatcactctttgtgtggaatctgcaagtggatatttggacctattttgaagatttcgttggaaacgggagaatcttcacaggaaagctaaacagaagcattctcagaaacttctctgtgatgtttgtgttcaactcccagagtttcacattgcttttcatagagtagttctgaaacatgcttttcgtagtgtctacaagtggacatttggagcgctttcaggcctgtggtggaaaacgaattatggtcacataaaaactggagagaagccttctcaggaaacttctctgtgatgattgcattcaactcacagagttgaaccctcctatggatagagcagtgttgaaactctctttttgtggaatctgcaagtggatatgtggacctctccgaagatgtctttggaaacgggaatatcttcacataaaaactaaacagaagcattctcagaaacttctttgtgatatttgcattcaaatcccagagttgaaacttcctttgataggtcaggtttgaaacactctttctgtacgatctgcaagtggatatttggaccactctgtggccttcgttcgaaacgggtacatcttcacataacatctagacagaagcattctcagaaaatactttgtgatgattgagtttaaatcacagagctgaccattcctttggatggagcaggtttgagacacactttttgtagaatctacaagtggatatttggacctctctgaggatttcgttggaaacgggataactgcacctaactaaacggaagcattctcagaaactgctttgtgatgattgcattcacctcacagagttgaacattcctattgatagagcagtttggaaacactcttgttgtggaatgtgcaagtggagatttggagcgctttgaggcctatggtagtaaagggaatagcttcatagaaaaactagacagatgcattctcaggaaccttttggtgatgtttgtattcaactcccagagttgaactttcctttggaaagagcagctatgaaacactctttttctagaatctgcaagtggacgtttggagggctttgtggtttgtggtggaaaaggaaatatcttcacctaaatactagatagaagcattctcagaagcttctctgtgatgactgcattcaactcacggagttgaacactccttttgagagcgcagttttgaaactctctttctgtggcatctgcaaggggacatgtagacctctttgaagatttcgttggaaacggaatcatcttcacataaaaactatacagaagcagtctcagaatcttctttgtgatgtttgcattcaaatcccagagttgaactttcctttcaaagttcacgtttgaaacactctttttgcaggatctacaagtggatatttggaccactctgtgtccttcgttcgaaacgggtatatcttcacacgacatctagacagaagctttctcagaaaattctttgggatgattgagtggaactcacagagctgaacattccttgcgatgtagcagtttagaaacacactttctgcagaatctgcaagtgcatatttggacctctctgaggaattcgttggaaacgggataatttcagctgactaaacagaagcattctcagaacttcttcgtgatgtctgcattcaactcacagtgtggaacctttctttgatagttcaggtttgaaacactctttttgtagaaactgcaaggggataattgcacttctttgaggcctaccgtagtaaaggaaataacttcctatagaaagaagacagaagcattctcagaaccttcttcgtgatgtttgcattcaactcacggtgctgaaactttctttgatagttcagctttgaaacactctttttgtagaaactgcaagtggatatttggtcctctctgaggatttcgttggaaacgggataaaacgcacagaactaaacagaagcattctcagaactttcttcgtgatgtttgcattcaactcacagtgttgaacctttctttgatagttcaggtttgaaacggtctttctgtagaaactgcaattagatatttggacctctctgaggatttcgttggaaacgggataaaccgcacagaactaaaacagaagcattcacagaaaactcttggtgacgactgagtttaactcacagagctgaacattcctttggatggagcagtttcgaaacacactatttgtagaatgtgcaagtggatatttaggcctctctgaggatttcgttggaaacgggataaaccgcacagaactaaacagaagcattctcagaaactactttgtgatgattgcattcaagtcacagagttgaacattccctttgacagagcagtttggaaactctctttgtgtagaatctgcaagtggagatatggaccgctttgaggcctatggtagtaaaggaaatagcttcatataaaagctagacagtagcattctcagaaacttctttgtgatgcttgcattcaactcacagagttgaactttcctttcgagagagaagctttgaaacactctttttccagaatctgcaagtggacatttggagggctttgaggcctgtggtggaaaaggaattatcttcccgtaaaagctagatagaagcattgtcagaaacttctttgtgatgattgcattcaagtcacagagttgaaggttccttttcaaagagcagtttccaatcactctttctgtggaatctgcaagtggatatttggacctctttgaagatttcgttggaaacgggagaatcttcacagaaaagctaaacagaagcattctcagaaacttctctgtgatgtttgtgttcaactcccagagtttcacattgcttctcatagagtagttctgaaacatgcttttcgtagtgtctgcaagtggacatttggagcgctttcaggcctgtggtggaaaacgaattatggtcacataaaaactggagagaagccttctcagaaacttctctgtgatgattgcattcaactcacagagttgaaccctcctatggatagagcagtgttgaaactctctttttgtggaatctgcaagtgtatatgtggacctctccaaagatgtctttggaaacgggactatcttcacataaaaactaaacagaagcattctcagaaacttcttggtgatgtttgcattcaaatcccagagttgaaccttcctttgatagttcaggtttgaaacactctttttgtaggatctgcaagtggatatttggaccactctgtggccttcgttcgaaacgggtacatcttcgcataaaatctagacagaagcattctcagaaaatactttgtgatgattgagtttaaatcacagagctgaccattcctttggatggagcaggtttgagacacactttttgtagaatctacaagtggatatttggacctctctgaggatttcgttggaaacgggataactgcacctaactaaacggaagcattctcagaaactgctttgtgatgattgcattcacctcacagagttgaacattcctattgatagagcagtttggaaacactcttgttgtggaatgtgcaagtggagatttggagcgctttgaggcctatggtagtaaagggaatagcttcatagaaaaactagacagatgcattctcaggaactttttggtgatgtttgtattcaactcccagagttgaactttcctttggaaagagcagctatgaaacactctttttctagaatctgcaagtggacgtttggagggctttgtggtttgtggtggaaaaggaaatatcttcacctaaatactagatagaagcatcctcagaagcttctctgtgatgactgcattcaactcacggagttgaacactccttttgagagcgcagttttgaaactctctttctgtggcatctgcaaggggacatgtagacctctttgaagatttcgttggaaacggaatcatcttcacataaaaactatacagaagcagtctcagaatcttctttgtgatgtttgcattcaaatcccagagttgaacttgcctttcaaagttcacgtttgaaacactctttttgcaggatctacaagtggatatttggaccactctgtgtccttcgttcgaaacgggtatatcttcacatgacatctagacagaagctttctcagaaaattctttgggatgattgagttgaactcacagagctgaacattccttgcgatgtagcagtttagaaacacactttctgcagaatctgcaagtgcatatttggacctctctgaggaattcgttggaaacgggataatttcagctgactaaacagaagcattctcagtaaccttcttcgtgatgtctgcattcaactcacagtgtggaacctttctttgatagttcaggtttgaaacactctttttgtagaaactgcaaggggataattgcacttctttgaggcctaccgtagtaaaggaaataacttcctataaaaagaagacagaagcattctcagaaccctcttcctgatgtttgcattcaactcacagtgctgaacctttctttgatagttcagctttgaaacactctttttgtagaaactgcaagtggatatttggtcctctctgaggatttcgttggaaacgggataaactgcacagaactaaacagaagcattctcagaaccttcttcgtgatgtttgcattcaactcacaagtgttgaacctttctttgatagttcaggtttgaaacggtctttctgtagaaactgcaagtagatatttggacctctctgaggatttcgttggaaacgggataacccgcacagaactaaaacagaagcattcacagaaaactcttggtgacgactgagtttaactcacagagctgaacattcctttggatggagcagtttcgaaacacactatttgtagaatgtgcaagtggatatttaggcctctctgaggatttcgttggaaacgggataaaccgcacagaactaaacagaagcattctcagaaactactttgtgatgattgcattcaagtcacagagttgaacattccctttgacagagcagtttggaaactctctttgtgtagaatctgcaagtggagatatggaccgctttgaggcctatggtagtaaaggaaatagcttcatataaaagctagacagtagcattctcagaaacttctttgtgatgcttgcattcaactcacagagttgaactttcctttcgagagagaagctttgaaacactctttttccagaatctgcaagtggacatttggagggctttgaggcctgtggtggaaaaggaattatcttcccgtaaaagctagatagaagcattgtcagaaacttctttgtgatgattgcattcaactcacagagttgaaggttccttttcaaagagcagtttccaatcactctttgtgtggaatctgcaagtggatatttggacctattttgaagatttcgttggaaacgggagaatcttcacaggaaagctaaacagaagcattctcagaaacttctctgtgatgtttgtgttcaactcccagagtttcacattgcttttcatagagtagttctgaaacatgcttttcgtagtgtctacaagtggacatttggagcgctttcaggcctgtggtggaaaacgaattatggtcacataaaaactggagagaagccttctcagaaacttctctgtgatgattgcattcaactcacagagttgaaccctcctatggatagagcagtgttgaaactctctttttgtggaatctgcaagtggatatgtggacctctccgaagatgtctttggaaacgggaatatcttcacataaaaactaaacagaagcattctcagaaacttcttggtgatgtttgcattcaaatcccagagttgaaccttcctttgatagttcaggtttgaaacactctttttgtaggatctgcaagtggatatttggaccactctgtggccttcgttcgaaacgggtatatcttcgcataaaatctagacagaagcattctcagaaaatactttgtgatgattgagtttaactcacagagctgaacattcctttggatggagcaggtttgagacacactttttgtagaatctacaagtggatatttggacctctctgaggatttcgttggaaacgggataactgcacctaactaaacggaagcattctcagaaactgctttgtgatgattgcattcacctcacagagttgaacattcctattgatagagcagtttggaaacactcttgttgtggaatgtgcaagtggagatttggagcgctttgaggcctatggtagtaaagggaatagcttcatagaaaaactagacagatgcattctcaggaactttttggtgatgtttgtattcaactcccagagttgaactttcctttggaaagagcagctatgaaacactctttttctagaatctgcaagtggacgtttggagggctttgtggtttgtggtggaaaaggaaatatcttcacctaaatactagatagaagcattctcagaagcttctctgtgatgactgcattcaactcacggagttgaacactccttttgagagcgcagttttgaaactctctttctgtggcatctgcaaggggacatgtagacctctttgaagatttcgttggaaacggaatcatcttcacatcaaaactatacagaagcagtctcagaatcttctttgtgatgtttgcattcaaatcccagagttgaactttcctttcaaagttcacgtttgaaacactctttttgcaggatctacaagtggatatttggaccactctgtgtccttcgttcgaaacgggtatatcttcacatgacatctagacagaagctttctcagaaaattctttgggatgattgagtggaactcacagagctgaacattccttgcgatgtagcagtttagaaacacactttctgcagaatctgcaagtgcatatttggacctctctgaggaattcgttggaaacgggataatttcagctgactaaacagaagcattctcagaaccttcttcgtgatgtctgcattcaactcgcagtgtggaacctttctttgatagttcaggtttgaaacactctttttgtagaaactgcaaggggataattgcacttctttgaggcctaccgtagtaaaggaaataacttcctatagaaagaagacagaagcattctcagaaccctcttcgtgatgtttgcattcaactcacagtgctgaacctttctttgatagttcagctttgaaacactcttcttgtagaaactgcaagtggatatttggtcctctctgaggatttcgttggaaaagggataaaccgcacagaactaaacagaagcattctcagagccctcttcgtgatgtttgcattcaactcacagtgctgaacctttctttgatagtgcagctttgaaacactctttttgtagaaactgcaagtggatatttggtcctctctgaggatttcgttggaaacgggataaatcccagagaactaaaacagaagcattcacagaaaactcttggtgacgactgagtttaactcacagagctgaacattcctttggatggagcagtttcgaaacacactatttgtagaatgtgcaagtggatatttgggcctctctgaggatttcgttggaaacgggataaaacgcacagaactaaatcagaagcattctcagaaactactttgtgatgattgcattcaagtcacagagttgaacattccctttgacagagcagtttggaaactctctttgtgtagaatctgcaagtggagatatggaccgctttgaggcctatggtagtaaaggaaatagcttcatataaaagctagacagtagcattctcagaaacttctttgtgatgcttgcattcaactcacagagttgaactttcctttcgagagagaagctttgaaacactctttttccagaatctgcaagtggacatttggagggctttgaggcctgtggtggaaaaggaattatcttcccgtaaaagctagatagaagcattgtcagaaacttctttgtgatgattgcattcaactcacagagttgaaggttccttttcaaagagcagtttccaatcactctttgtgtggaatctgcaagtggatatttggacctattttgaagatttcgttggaaacgggagaatcttcacaggaaagctaaacagaagcattctcagaaacttctctgtgatgtttgtgttcaactcccagagtttcacattgcttttcatagagtagttctgaaacatgcttttcgtagtgtctacaagtggacatttggagcgctttcaggcctgtggtggaaaacgaattatggtcacataaaaactggagagaagccttctcagaaacttctctgtgatgattgcattcaactcacagagttgaaccctcctatggatagagcagtgttgaaactctctttttgtggaatctgcaagtggatacgtggacctctccgaagatgtctttggaaacgggaatatcttcacataaaaactaaacagaagcattctcagaaacttcttggtgatgtttgcattcaaatcccagagttgaaccttcctttgatagttcaggtttgaaacactctttttgtaggatctgcaagtggatatttggaccactctgtggccttcgttcgaaacgggtatatcttcgcataaaatctagacagaagcattctcagaaaatactttgtgatgattgagtttaactcaaagagctgaacattcctttgggtggagcaagtttgagacacactttttgtagaatctacaagtggatatttggacctctctgaggatttcgttggaaacgggataactgcacctaactaaacggaagcattctcagaaactgctttgtgatgattgcattcacctcacagagttgaacattcctattgatagagcagtttggaaacactcttgttgtggaatgtgcaagtggagatttggagcgctttgaggcctatggtagtaaagggaatagcttcatagaaaaactagacagatgcattctcaggaactttttggtgatgtttgtattcaactcccagagttgaactttcctttggaaagagcagctatgaaacactctttttctagaatctgcaagtggacgtttggagggctttgtggtttgtggtggaaaaggaaatatcttcacctaaatactagatagaagcattctcagaagcttctctgtgatgactgcattcaactcacggagttgaacactccttttgagagcgcagttttgaaactctctttctgtggcatctgcaaggggacatgtagacctctttgaagatttcgttggaaacggaatcatcttcacataaaaactatacagaagcagtctcagaatcttctttgtgatgtttgcattcaaatcccagagttgaactttcctttcaaagttcacgtttgaaacactctttttgcaggatctacaagtggatatttggaccactctgtgtccttcgttcgaaacgggtatatcttcacacgacatctagacagaagctttctcagaaaattctttgggatgattgagtggaactcacagagctgaacattccttgcgatggagcagtttagaaacacactttctgcagaatctgcaagtgcatatttggacctctctgaggaattcgttggaaacgggataatttcagctgactaaacagaagcattctcagaaccttcttcgtgatgtctgcattcaactcacagtgtggaacctttctttgatagttcaggtttgaaacactctttttgtagaaactgcaaggggataattgcacttctttgaggcctaccgtagtaaaggaaataacttcctatagaaagaagacagaagcattctcagaaccctcttcgtgatgtttgcattcaactcacagtgctgaacctttctttgatagttcagctttgaaacactcttcttgtagaaactgcaagtggatatttggtcctctctgaggatttcgttggaaacgggataaaccgcacagaactaaacagaagaattctcagagccctcttcgtgatgtttgcattcaactcacagtgctgaacctttctttgatagtgcagctttgaaacactctttttgtagaaactgcaagtggatgtttggtcctctctgaggatttcgttggaaacgggataaaccgcacagaactaaaacagaagcattgtcagaaacttctttgtgatgattgcattcaactcacagagttgaaggttccttttcaaacagcagtttccaatcactctttctgtggaatctgcaagtggatatttgggcctctctgaggatttcgttggaaacgggataaaacgcacagaactaaaacagaagcatcctcagaaacttctctgtgatgtttgtgttcaactcccagtgtttcacattgcttttcatagagtagttctgaaacatgcttttcgtagtgtctgcaagtggacatttggagcgctttcaggcctgtggtggaaaacgaattatggtcccataaaaactggagggaagccttctcagaaacttctctgtgatgattgcattcaactcacagagttgaaccctcctatggatagagcagtgttgaaactctctttttgtggaatctgcaagtggatatgtggacctctccgaagatgtctttggaaacgggaatatcttcacataaaaactaaacagaagcattctcagaaacttcttggtgatgtttgcattcaaatcccagagttgaaccttcctttgatagttcaggtttgaaacactctttctgtaggatctgcaagtggctatttggaccactctgtggccttcgttcgaaacgggtatatcttcgcataaaatctagacagaagcattctcagaaaatactttgtgatgattgagtttaaatcacagagctgaccattcctttggatggagcaggtttgagacacactttttgtagaatctacaagtggatatttggacctctctgaggatttcgttggaaacgggataactgcacctaactaaacggaagcattctcagaaactgctttgtgatgattgcattcacctcacagagttgaacattcctattgatagagcagtttggaaacactcttgttgtggaatgtgcaagtggagatttggagcgctttgaggcctgtggtagcaaagggaatagcttcatagaaaaactagacagatgcattctcaggaacttctttttggtgatgtttgtattcaactcccagagttgaactttcctttggaaagagcagctatgaaacactctttttctagaatctgcaagtggacgtttggagggctttgtggtttgtggtggaaaaggaaatatcttcacctaaatactagatagaagcattctcagaagcttctctgtgatgactgcattcaactcacggagttgaacactccttttgagagcgcagttttgaaactctctttctgtggcatctgcaaggggacatgtagacctctttgaagatttcgttggaaacggaatcatcttcacataaaaactatacagaagcagtctcagaatcttctttgtgatgtttgcattcaaatcccagagttgaactttcctttcaaagttcacgtttgaaacactctttttgcaggatctacaagtggatatttggaccactctgtgtccttcgttcgaaacgggtatatcttcacacgacatctagacagaagctttctcagaaaattctttgggatgattgagtggaactcacagagctgaacattccttgcgatgtagcagtttagaaacacactttctgcagaatctgcaagtgcatatttggacctctctgaggaattcgttggaaacgggataatttcagctgactaaacagaagcattctcagaaccttcttcgtgatgtctgcattcaactcacagtgtggaacctttctttgatagctcaggtttgaaacactctttttgtagaaactgcaaggggataattgcacttctttgaggcctaccgtagtaaaggaaataacttcctatagaaagaagacagaagcattctcagaaccctcttcgtgatgtttgcattcaactcacagtgctgaacctttctttgatagttcagctttgaaacactcttcttgtagaaactgcaagtggatatttggtcctctctgaggatttcgttggaaacgggataaaccgcacagaactaaacagaagaattctcagagccctcttcgtgatgtttgcattcaactcacagtgctgaacctttctttgatagtgcagctttgaaacactctttttgtagaaactgcaagtggatgtttggtcctctctgaggatttcgttggaaacgggataaaccgcacagaactaaaacagaagcattgtcagaaacttctttgtgatgattgcattcaactcacagagttgaaggttccttttcaaacagcagtttccaatcactctttctgtggaatctgcaagtggatatttgggcctctctgaggatttcgttggaaacgggataaaacgcacagaactaaaacagaagcattctcagaaacttctctgtgatgtttgtgttcaactcccagagtttcacgttgcttttcatagagtagttctgaaacatgcttttcgtagtgtctgcaagtggacatttggagcgctttcaggcctgtggtggaaaacgaattatggtcacataaaaactggagagaagccttctcagaaacttctctgtgatgattgcattcaactcacagagttgaaccctcctatggatagagcagtgttgaaactctctttttgtggaatctgcaagtggatatgtggacctctccgaagatgtctttggaaacgggaatatcttcacataaaaactaaacagaagcattctcagaaaacttcttggtgatgtttgcattcaaatcccagagttgaaccttcctttgatagttcaggtttgaaacactctttctgtaggatctgcaagtggctatttggaccactctgtggccttcgttcgaaacgggtatatcttcgcataaaatctagacagaagcattctcagaaaatactttgtgatgattgagtttaaatcacagagctgaccattcctttggatggagcaggtttgagacacactttttgtagaatctacaagtggatatttggacctctctgaggatttcgttggaaacgggataactgcacctaactaaacggaagcattctcagaaactgctttgtgatgattgcattcacctcacagagttgaacattcctattgatagagcagtttggaaacactcttgttgtggaatgtgcaagtggagatttggagcgctttgaggcctgtggtagtaaagggaatagcttcatagaaaaactagacagatgcattctcaggaactttttggtgatgtttgtattcaactcccagagttgaactttcctttggaaagagcagctatgaaacactctttttctagaatctgcaagtggacgtttggagggctttgtggtttgtggtggaaaaggaaatatcttcacctaaatactagatagaagcatcctcagaagcttctctgtgatgactgcattcaactcacggagttgaacactccttttgagagcgcagttttgaaactctctttctgtggcatctgcaaggggacatgtagacctctttgaagatttcgttggaaacggaatcatcttcacataaaaactatacagaagcagtctcagaatcttctttgtgatgtttgcattcaaatccccgagttgaactttcctttcaaagttcacgtttgaaacactctttttgcaggatctacaagtggatatttggaccactctgtgtccttcgttcgaaacgggtatatcttcacatgacatctagacagaagctttctcagaaaattctttgggatgattgagttgaactcacagagctgagcattccttgcgatgtagcagtttagaaacacactttctgcagaatctgcaagtgcatatttggacctctgtgaggaattcgttggaaacgggataatttcagctgactaaacagaagcattctcagaaccttcttcgtgatgtctgcattcaactcacagtgtggaacctttctttgatagttcaggtttgaaacactctttttgtagaaactgcaaggggataattgcactctttgaggagtaccgtagtaaaggaaataacttcctataaaaagaagacagaagcattctcagaaccctcttcgtgatgtttgcattcaactcacagtgctgaacctttctttgatagttcagctttgaaacactctttttgtagaaactgcaagtggatatttggtcctctctgagcatttcgttggaaacgggataaactgcacagaactaaacagaagcattctcagaaccttcttcgtgatgtttgcattcaactcacagtgttgaacctttctttgatagttcaggtttgaaacggtctttctgtagaaactgcaagtagatatttggacctctctgaggatttcgttggaaacgggataacccgcacagaactaaaacagaagcattcacagaaaactcttggtgacgactgagtttaactcacagagctgaacattcctttggatggagcagtttcgaaacacactatttgtagaatgtgcaagtggatatttgggcctctctgaggatttcgttggaaacgggataaaccgcacagaactaaacagaagcattctcagaaactactttgtgatgattgcattcaagtcacagagttgaacattccctttgacagagcagtttggaaactctctttgtgtagaatctgcaagtggagatatggaccgctttgaggcctatggtagtaaaggaaatagcttcatataaaagctagacagtagcattctcagaaacttctttgtgatgcttgcattcaactcacagagttgaactttcctttcgagagagaagctttgaaacactctttttccagaatctgcaagtggacatttggagggctttgaggcctgtggtggaaaaggaattatcttcccgtaaaagctagatagaagcattgtcagaaacttctttgtgatgattgcattcaactcacagagttgaaggttccttttcaaagagcagtttccaatcactctttgtgtggaatctgcaagtggatatttggacctattttgaagatttcgttggaaacgggagaatcttcacaggaaagctaaacagaagcattctcagaaacttctctgtgatgtttgtgttcaactcccagagtttcacattgcttttcatagagtagttctgaaacatgcttttcgtagtgtctacaagtggacatttggagcgctttcaggcctgtggtggaaaacgaattatggtcacataaaaactggagagaagcgttctcagaaacttctctgtgatgattgcattcaactcacagagttgaaccctcctatggatagagcagtgttgaaactctctttttgtggaatctgcaagtggatacgtggacctctccgaagacgtctttggaaacgggaatatcttcacataaaaactaaacagaagcattctcagaaacttcttggtgatgtttgcattcaaatcccagagttgaaccttcctttgatagttcaggtttgaaacactctttctgtaggatctgcaagtggctatttggaccactctgtggccttcgttcgaaacgggtatatcttcgcattaaaatctagacagaagcattctcagaaaatactttgtgatgattgagtttaaatcacagagctgaccattcctttggatggagcaggtttgagacacactttttgtagaatctacaagtggatatttggacctctctgaggatttcgttggaaacgggataactgcacctaactaaacggaagcattctcagaaactgctttgtgatgattgcattcacctcacagagttgaacattcctattgatagagcagtttggaaacactcttgttgtggaatgtgcaagtggagatttggagcgctttgaggcctatggtagtaaagggaatagcttcatagaaaaactagacagatgcattctcaggaactttttggtgatgtttgtattcaactcccagagttgaactttcctttggaaagagcagctatgaaacactctttttctagaatctgcaagtggacgtttggagggctttgtggtttgtggtggaaaaggaaatatcttcacctaaatactagatagaagcattctcagaagcttctctgtgatgactgcattcaactcacggagttgaacactccttttgagagcgcagttttgaaactctctttctgtggcatctgcaaggggacatgtagacctctttgaagatttcgttggaaacggaatcatcttcacataaaaactatacagaagcagtctcagaatcttctttgtgatgtttgcattcaaatcccagagttgaactttcctttcaaagttcacgtttgaaacactctttttgcaggatctacaagtggatatttggaccactctgtgtccttcgttcgaaacgggtatatcttcacacgacatctagacagaagctttctcagaaaattctttgggatgattgagtggaactcacagagctgaacattccttgcgatgtagcagtttagaaacacactttctgcagaatctgcaagtgcatatttggacctctctgaggaattcgttggaaacgggataatttcagctgactaaacagaagcattctcagaaccttcttcgtgatgtctgcattcaactcacagtgtggaacctttctttgatagttcaggtttgaaacactctttttgtagaaactgcaaggggataattgcacttctttgaggcctaccgtagtaaaggaaataacttcctatagaaagaagacagaagcattctcagaaccctcttcgtgatgtttgcattcaactcacagtgctgaacctttctttgatagttcagctttgaaacactcttcttgtagaaactgcaagtggatatttggtcctctctgaggatttcgttggaaacgggataaaccgcacagaactaaacagaagaattctcagagccctcttcgtgatgtttgcattcaactcacagtgctgaacctttctttgatagtgcagctttgaaacactctttttgtggaaactgcaagtggatgtttggtcctctctgaggatttcgttggaaacgggataaaccgcacagaactaaaacagaagcattgtcagaaacttctttgtgatgattgcattcaactcacagagttgaaggttccttttcaaacagcagtttccaatcactctttctgtggaatctgcaagtggatatttgggcctctctgaggatttcgttggaaacgggataaaacgcacagaactaaaacagaagcattctcagaaacttctctgtgatgtttgtgttcaactcccagagtttcacattgcttttcatagagtagttctgaaacatgcttttcgtagtgtctacaagtggacatttggagcgctttcaggcctgtggtggaaaacgaattatggtcacataaaaactggagagaagccttctcagaaacttctctgtgatgattgcattcaactcacagagttgaaccctccctatggatagagcagtgttgaaactctctttttgtggaatctgcaagtggatatgtggacctctccgaagatgtctttggaaacgggaatatcttcacataaaaactaaacagaagcattctcagaaaattcttggtgatgtttgcattcaaatcccagagttgaaccttcctttgatagttcaggtttgaaacactctttttgtaggatctgcaagtggatatttggaccactctgtggccttcgttccaaacgggtacatcttcgcataaaatctagacagaagcattctcagaaaatactttgtgatgattgagttgaactcacagagctgaacattcctttggatggagcaggtttgagacacactttttgtagaatctacaagtggatatttggacctctctgaggatttcgttggaaacgggataactgcacataactaaacggaagcattctcagaaactgctttgtgatgattgcattcacgtcacagagttgaacattcctattgatagagcagtttggaaacactcttgttgtggaatgtgcaagtggagatttggagcgctttgaggcctatggtagtaaagggaatagcttcatagaaaaactagacagatgcattctcaggaaccttttggtgatgtttgtattcaactcccagagttgaactttcctttggaaagagcagctatgaaacactctttttctagaatctgcaagtggacgtttggagggctttgtggtttgtggtggaaaaggaaatatcttcacctaaatactagatagaagcattctcagaagcttctctgtgatgactgcattcaactcacggagttgaacactccttttgagagcgcagttttgaaactctctttctgtggcatctgcaaggggacatgtagacctctttgaagatttcgttggaaacggaatcatcttcacataaaaactatacagaagcagtctcagaatcttctttgtgatgtttgcattcaaatcccagagttgaactttcctttcaaagttcacgtttgaaacactctttttgcaggatctacaagtggatatttggaccactctgtgtccttcgttcgaaacgggtatatcttcacacgacatctagacagaagctttctcagaaaattctttgggatgattgagtggaactcacagagctgaacattccttgcgatggagcagtttagaaacacactttctgcagaatctgcaagtgcatatttggacctctctgaggaattcgttggaaacgggataatttcagctgactaaacagaagcattctcagaaccttcttcgtgatgtctgcattcaactcacagtgtggaacctttctttgatagttcaggtttgaaacactctttttgtagaaactgcaaggggataattgcacttctttgaggcctaccgtagtaaaggaaataacttcctatagaaagaagacagaagcattctcagaaccctcttcgtgatgtttgcattcaactcacagtgctgaacctttctttgatagttcagctttgaaacactcttcttgtagaaactgcaagtggatatttggtcctctctgaggatttcgttggaaacgggataaaccgcacagaactaaacagaagcattctcagagccctcttcgtgatgtttgcattcaactcacagtgctgaacctttctttgatagtgcagctttgaaacactctttttgtagaaactgcaagtggatgtttggtcctctctgaggatttcgttggaaacgggataaaccgcacagaactaaaacagaagcattgtcagaaacttctttgtgatgattgcattcaactcacagagttgaaggttccttttcaaacagcagtttccaatcactctttctgtggaatctgcaagtggatatttgggcctctctgaggatttcgttggaaacgggataaaacgcacagaactaaaacagaagcattctcagaaacttctctgtgatgtttgtgttcaactcccagagtttcacgttgcttttcatagagtagttctgaaacatgcttttcgtagtgtctgcaagtggacatttggagcgctttcaggcctgtggtggaaaacgaattatggtcacataaaaactggagagaagccttctcagaaacttctctgtgatgattgcattcaactcacagagttgaaccctcctatggatagagcagtgttgaaactctctttttgtggaatctgcaagtggatatgtggacctctccgaagatgtctttggaaacgggaatatcttcacataaaaactaaacagaagcattctcagaaacttcttggtgatgtttgcattcaaatcccagagttgaaccttcctttgatagttcaggtttgaaacactctttctgtaggatctgcaagtggctatttggaccactctgtggccttcgttcgaaacgggtatatcttcgcataaaatctagacagaagcattctcagaaaatactttgtgatgattgagtttaaatcacagagctgaccattcctttggatggagcaggtttgagacacactttttgtagaatctacaagtggatatttggacctctctgaggatttcgttggaaacgggataactgcacctaactaaacggaagcattctcagaaactgctttgtgatgattgcattcacctcacagagttgaacattcctattgatagagcagtttggaaacactcttgttgcggaatgtgcaagtggagatttggagcgctttgaggcctgtggtagtaaagggaatagcttcatagaaaaactagacagatgcattctcaggaaccttttggtgatgtttgtattcaactcccagagttgaactttcctttggaaagagcagctatgaaacactctttttctagaatctgcaagtggacgtttggagggctttgtggtttgtggtggaaaaggaaatatcttcacctaaatactagatagaagcattctcagaagcttctctgtgatgactgcattcaactcacggagttgaacactccttttgagagcgcagttttgaaactctctttctgtggcatctgcaaggggacatgtagacctctttgaagatttcgttggaaacggaatcatcttcacataaaaactatacagaagcagtctcagaatcttctttgtgatgtttgcattcaaatcccagagttgaactttcctttcaaagttcacgtttgaaacactctttttgcaggatctacaagtggatatttggaccactctgtgtccttcgttcgaaacgggtatatcttcacacgacatctagacagaagctttctcagaaaattctttgggatgattgagtggaactcacagagctgaacattccttgcgatgtagcagtttagaaacacactttctgcagaatctgcaagtgcatatttggacctctctgaggaattcgttggaaacgggataatttcagctgactaaacagaagcattctcagaaccttcttcgtgatgtctgcattcaactcacagtgtggaacctttctttgatagttcaggtttgaaacactctttttgtagaaactgcaaggggataattgcacttctttgaggcctaccgtagtaaaggaaataacttcctatagaaagaagacagaagcattctcagaaccctcttcgtgatgtttgcattcaactcacagtgctgaacctttctttgatagttcagctttgaaacactcttcttgtagaaactgcaagtggatatttggtcctctctgaggatttcgttggaaacgggataaaccgcacagaactaaacagaagaattctcagagccctcttcgtgatgtttgcattcaactcacagtgctgaacctttctttgatagtgcagctttgaaacactctttttgtagaaactgcaagtggatgtttggtcctctctgaggatttcgttggaaaccgggataaaccgcacagaactaaaacagaagcattcacagaaaactcttggtgacgactgagtttaactcacagagctgaacattcctttggatggagcagtttcgaaacacactatttgtagaatctgcaagtggatatttgggcctctctgaggatttcgttggaaacgggataaaacgcacagaactaaaacagaagcattctcagaaactactttgtgatgattgcattcaagtcacagagttgaacattccctttgacagagcagtttggaaactctctttgtgtagaatctgcaagtggagatatggaccgctttgaggcctatggtagtaaaggaaatagcttcatataaaagctagacagtagcattctcagaaacttctttgtgatgcttgcattcaactcacagagttgaactttcctttcgagagagaagctttgaaacactctttttccagaatgtgcaagtggacatttggggagctttgaggcctgtgctggaaaaggaattatcttcccgtaaaagctagatagaagcattgtcagaaacttctttgtgatgattgcattcaactcacagagttgaaggttccttttcaaacagcagtttccaatcactctttctgtggaatctgcaagtggatatttcgacctctttgaagatttcgttggaaacgggagaatcttcacagaaaagctaaacagaagcattctcagaaacttctctgtgatgtttgtgttcaactcccagagtttcacgttgcttttcatagagtagttctgaaacatgcttttcgtagtgtctgcaagtggacatttggagcgctttcaggcctgtggtggaaaacgaattatggtcacataaaaactggagagaagccttctcagaaacttctctgtgatgattgcattcaactcacagagttgaaccctccctatggatagagcagtgttgaaactctctttttgtggaatctgcaagtggatatgtggacctctccgaagatgtctttggaaacgggaatatcttcacataaaaactaaacagaagcattctcagaaacttcttggtgatgtttgcattcaaatcccagagttgaaccttcctttgatagttcaggtttgaaacactctttttgtaggatctgcaagtggatatttggaccactctgtggccttcgttcgaaacgggtacatcttcgcataaaatctagacagaagcattctcagaaaatactttgtgatgattgagttgaactcacagagctgaacattcctttggatggagcaggtttgagacacactttttgtagaatctacaagtggatatttggacctctctgaggatttcgttggaaatgggataactgcacctaactaaacggaagcattctcagaaactgctttgtgatgattgcattcacctcacagagttgaacattcctattgatagagcagtttggaaacactcttgttgtggaatgtgcaagtggagatttggagcgctttgaggcctatggtagtaaagggaatagcttcatagaaaaactagacagatgcattctcaggaactttttggtgatgtttgtattcaactcccagagttgaactttcctttggaaagagcagctatgaaacactctttttctagaatctgcaagtggacagtttggagggctttgtggtttgtggtggaaaaggaaatatcttcacctaaatactagatagaagcattctcagaagcttctctgtgatgactgcattcaactcacggagttgaacactccttttgagagcgcagttttgaaactctctttctgtggcatctgcaaggggacatgtagacctctttgaagatttcgttggaaacggaatcatcttcacataaaaactatacagaagcagtctcagaatcttctttgtgatgtttgcattcaaatcccagagttgaactttcctttcaaagttcacgtttgaaacactctttttgcaggatctacaagtggatatttggaccactctgtgtccttcgttcgaaacgggtatatcttcacacgacatctagacagaagctttctcagaaaattctttgggatgattgagtggaactcacagagctgaacattccttgcgatggagcagtttagaaacacactttctgcagaatctgcaagtgcatatttggacctctctgaggaattcgttggaaacgggataatttcagctgactaaacagaagcattctcagaaccttcttcgtgatgtctgcattcaactcacagtgtggaacctttctttgatagttcaggtttgaaacactctttttgtagaaactgcaaggggataattgcacttctttgaggcctaccgtagtaaaggaaataacttcctatagaaagaagacagaagcattctcagaaccctcttcgtgatgtttgcattcaactcacagtgctgaacctttctttgatagttcagctttgaaacactcttcttgtagaaactgcaagtggatatttggtcctctctgaggatttcgttggaaacgggataaaccgcacagaactaaacagaagaattctcagagccctcttcgtgatgtttgcattcaactcacagtgctgaacctttctttgatagtgcagctttgaaacactctttttgtagaaactgcaagtggatgtttggtcctctctgaggatttcgttggaaacgggataaaccgcacagaactaaaacagaagcattgtcagaaacttctttgtgatgattgcattcaactcacagagttgaaggttccttttcaaacagcagtttccaatcactctttctgtggaatctgcaagtggatatttgggcctctctgaggatttcgttggaaacgggataaaacgcacagaactaaaacagaagcattctcagaaacttctctgtgatgtttgtgttcaactcccagagtttcacgttgcttttcatagagtagttctgaaacatgcttttcgtagtgtctgcaagtggacatttggagcgctttcaggcctgtggtggaaaacgaattatggtcacataaaaactggagagaagccttctcagaaacttctctgtgatgattgcattcaactcacagagttgaaccctcctatggatagagcagtgttgaaactctctttttgtggaatctgcaagtggatatgtggacctctccgaagatgtctttggaaacgggaatatcttcacataaaaactaaacagaagcattctcagaaactgctttgtgatgattgcattcacctcacagagttgaacattcctattgataaagcagttcataaacgctcttgttgcagaatctgcaagtggatatttggaccactctgtggccttcgttcgaaacgggtacatcttcacataaaatctagacagaagcattctcagaaaatagtttgtgatgattgagttgaactcacagagctgaacattcctttggatggagcaggtttgagacacactttttgtagaatctacaagtggatatttggacctctctgaggatttcgttggaaacgggataactgcacctaactaaacggaagcattctcagaaactgctttgtgatgattgcattcacatcacagagttgaacattcctattgatagagcagtttggaaacactcttgttgtggaatgtgcaagtggagatttggagcgctttgaggcctatggtagtaaagggaatagcttcatagaaaaactagacagatgcattctcaggaactttttggtgatgtttgtattcaactcccagagttgaactttcctttggaaagagcagctatgaaacactctttttctagaatctgcaagtggacgtttggagggctttgtggtttgtggtggaaaaggaaatatcttcacctaaatactagatagaagcattctcagaagcttctctgtgatgactgcattcaactcacggagttgaacactccttttgagagcgcagttttgaaactctctttctgtggcatctgcaaggggacatgtagacctctttgaagatttcgttggaaacggaattcatcttcacataaaaactatacagaagcagtctcagaatcttctttgtgatgtttgcattcaaatcccagagttgaactttcctttcaaagttcacgtttgaaacactctttttgcaggatctacaagtggatatttggaccactctgtgtccttcgttcgaaacgggtatatcttcacatgacatctagacagaagctttctcagaaaattctttgggatgattgagttgaactcacagagctgaacattccttgcgatgtagcagtttagaaacacactttctgcagaatctgcaagtgcatatttggacctctctgaggaattcgttggaaacgggataatttcagctgactaaacagaagcattctcagaaccttcttcgtgatgtctgcattcaactcacagtgtggaatctttctttgatagttcaggtttgaaacactctttttgtagaaactgcaaggggataattgcacttctttgaggcctaccgtagtaaaggaaataacttcctataaaaagaagacagaagcattctcagaaccctcttcgtgatgtttgcattcaactcacagtgctgaacctttctttgatagttcagctttgaaacactcttcttgtagaaactgcaagtggatatttggtcctctctgaggatttcgttggaaacgggataaaccgcacagaactaaacagaagatttctcagagccctcttcgtgatgtttgcattcaactcacagtgctgaacctttctttgatagtgcagctttgaaacactctttttgtagaaactgcaagtggatatttggtcctctctgaggatttcgttggaaacgggataaaccgcacagaactaaaacagaagcattcacagaaaactcttggtgacgactgagtttaactcacagagctgaacattcctttggatggagcagtttcgaaacacactatttgtagaatctgcaagtggatatttgggcctctctgaggatttcgttggaaacgggataaaacgcacagaactaaaacagaagcattctcagaaactactttgtgatgattgcattcaagtcacagagttgaacattccctttgacatagcagtttggaaactctctttgtgtagaatctgcaagtggagatatggaccgctttgaggcctacggtagtaaaggaaatagcttcatataaaagctagacagtagcattctcagaaacttctttgtgatgcttgcattcaactcacagagttgaactttcctttcgagagagaagctttgaaacactctttttccagaatgtgcaagtggacatttggggagctttgaggcctggggtggaaaaggaattatcttcccgtaaaagctagatagaagcattgtcagaaacttctttgtgatgattgcattcaactcacagagttgaaggttccttttcaaacagcagtttccaatcactctttctgtggaatctgcaagtggatatttcgacctctttgaagatttcgttggaaacgggagaatcttcccagaaaagctaaacagaagcattctcagaaacttctctgtgatgtttgtgttcaactcccagagtttcacgttgcttttcatagagtagttctgaaacatgcttttcgtagtgtctgcaagtggacatttggagcgctttcaggcctgtggtggaaaacgaattatggtcacataaaaactggagagaagccttctcagaaacttctctgtgatgattgcattcaactcacagagttgaaccctcctatggatagagcagtgttgaaactctctttttgtggaatctgcaagtggatatgtggacctctccgaagatgtctttggaaacgggaatatcttcacataaaaactaaacagaagcattctcagaaacttcttggtgatatttgcattcaaatcccagagttgaaccttcctttgatagttcaggtttgaaacactctttttgtaggatctgcaagtggctatttggaccactctgtggccttcgttcgaaacgggtacatcttcgcataaaatctagacagaagcattctcagaaaatactttgtgatgattgagtttaactcacagagctgaacattcctttggatggagcaggtttgagacacactttttgtagaatctacaagcggatatttggacctctctgaggatttcgttggaaacgggataactgcacctaactaaacggaagcattctcagaaactgctttgtgatgattgcattcacctcacagagttgaccattcctattgatagagcagtttggaaacactcttgttgtggaatgtgcaagtgcagatttggagcgctttgaggcctatggtagtaaagggaatagcttcatagaaaatctagacagatgcattcacaggaactttttggtgatgtttgtattcaactcccagagttgaactttcctttggaaagagcagctatgaaacactctttttctagaatctgcaagtggacgtttggagggctttgtggtttgtggtggaaaaggaaatatcttcacctaaatactagatagaagcattctcagaagcttctctgtgatgactgcattcaactcacggagttgaacactccttttgagagcgcagttttgaaactctctttctgtagcatctgcaaggggacatgttgacctctttgaagatttcgttggaaacggaatcatcttcacataaaaactatacagaagcagtctcagaatcttctttgtgatgtttgcattcaaatcccagagttgaactttcctttcaaagttcacgtttgaaacactctttttgcaggatctacaagtggatatttggaccactctgtgtccttcgttcgaaacgggtatatcttcacatgacatctagacagaagctttctcagaaaattctttgggatgattgagtggaactcacagagctgaacattccttgcgatgtagcagtttagaaacacactttctgcagaatctgcaagtgcatatttggacctctctgaggaattcgttggaaacgggataatttcagctgactaaacagaagcattctcagaaccttcttcgtgatgtctgcattcaactcacagtgtggaacctttctttgatagttcaggtttgaaacactctttttgtagaaactgcaaggggataatggcacttctttgaggcctaccgtagtaaaggaaataacttcctatagaaagaagacagaagcattctcagaaccctcttcgtgatgtttgcattcaactcacagtgctgaacctttctttgatagttcagctttgaaacactcttcttgtagaaactgcaagtggatatttggtcctctctgaggatttcgttggaaacgggataaaccgcacagaactaaacagaagcattctcagaaccttcttcgtgatgtttgcattcaactcacagtgttgaacctttctttgatagttcaggtttgaaacggtctttctgtagaaactgcaagtagatatttggacctctctgaggatttcgttggaaacgggataaaccgcacagaactaaaacagaagcattcacagaaaactcttggtgacgactgagtttaactcacagagctgaacattcctttggatggagcagtttcgaaacacactatttgtagaatgtgcaagtggatatttgggcctctctgaggatttcgttggaaacgggataaaccgcacagaaataaacagaagcattctcagaaactactttgtgatgattgcattcaagtcacagagttgaacattccctttgacagagcagtttggaaactctctttgtgtagaatctgcaagtggagatatggaccgctttgaggcctatggtagtaaaggaaatagcttcatataaaagctagacagtagcattctcagaaacttctttgtgatgcttgcattcaactcacagagttgaactttcctttggagagagaagctttgaaacactctttttccggaatctgcaagtggacatttggagggctttgaggcctgtggtggaaaaggaattatcttcccgtaaaagctagatagaagcattgtcagaaacttctttgtgatgattgcattcaactcacagagttgaaggttccttttcaaacagcagtttccaatcactctttctgtggaatctgcaagtggatatttcgacctctttgaagatttcgttggaaacgggagaatcttcacagaaaagctaaacagaagcattctcagaaacttctctgtgatgtttgtgttcaactcccagagtttcacgttgcttttcatagagtagttctgaaacatgcttttcgtagtgtctgcaagtggacatttggagcgctttcaggcctgtggtggaaaacgaattatggtcacataaaaactggagagaagccttctcagaaacttctctgtgatgattgcattcaactcacagagttgaaccctcctatggatagagcagtgttgaaactctctttttgtggaatctgcaagtggatatgtggacctctccgaagatgtctttggaaacgggaatatcttcacataaaaactaaacagaagcattctcagaaacttcttggtgatgtttgcattcaaatcccagagttgaaccttcctttgatagttcaggtttgaaacactctttctgtaggatctgcaagtggctatttggaccactctgtggccttcgttcgaaacgggtatatcttcgcataaaatctagacagaagcattctcagaaaatactttgtgatgattgagtttaaatcacagagctgaccattcctttggatggagcaggtttgagacacactttttgtagaatctacaagtggatatttggacctctctgaggatttcgttggaaacgggataactgcacctaactaaacggaagcattctcagaaactgctttgtgatgattgcattcacctcacagagttgaacattcctattgatagagcagtttggaaacactcttgttgtggaatgtgcaagtggagatttggagcgctttgaggcctatggtagtaaagggaatagcttcatagaaaaactagacagatgcattctcaggaactttttggtgatgtttgtattcaactcccagagttgaactttcctttggaaagagcagctatgaaacactctttttctagaatctgcaagtggacgtttggagggctttgtggtttgtggtggaaaaggaaatatcttcacctaaatactagacagaagcattctcagaagcttctctgtgatgactgcattcaactcacggagttgaacactccttttgagagcgcagttttgaaactctctttctgtggcatctgcaaggggacatgtagacctctttgaagatttcgttggaaacggaatcatcttcacataaaaactatacagaagcagtctcagaatcttctttgtgatgtttgcattcaaatcccagagttgaactttcctttcaaagttcacgtttgaaacactctttttgcaggatctacaagtggatatttggaccactctgtgtccttcgttcgaaacgggtatatcttcacacgacatctagacagaagctttctcagaaaattctttgggatgattgagtggaactcacagagctgaacattccttgcgatgtagcagtttagaaacacactttctgcagaatctgcaagtgcatatttggacctctctgaggaattcgttggaaacgggataatttcagctgactaaacagaagcattctcagaaccttcttcgtgatgtctgcattcaactcacagtgtggaacctttctttgatagttcaggtttgaaacactctttttgtagaaactgcaaggggataattgcacttctttgaggcctaccgtagtaaaggaaataacttcctatagaaagaagacagaagcattctcagaaccctcttcgtgatgtttgcattcaactcacagtgctgaacctttctttgatagttcagctttgaaacactcttcttgtagaaactgcaagtggatatttggtcctctctgaggatttcgttggaaacgggataaaccgcacagaactaaacagaagaattctcagagccctcttcgtgatgtttgcattcaactcacagtgctgaacctttctttgatagtgcagctttgaaacactctttttgtagaacctgcaagtggatatttggtcctctctgaggatttcgttggaaacgggataaaccgcacagaactaaaacagaagcattgtcagaaacttctttgtgatgattgcattcaactcacagagttgaaggttccttttcaaacagcagtttccaatcactctttctgtggaatctgcaagtggatatttgggcctctctgaggatttcgttggaaacgggataaaacgcacagaactaaaacagaagcattctcagaaacttctctgtgatgtttgtgttcaactcccagagtttcacgttgcttttcatagagtagttctgaaacatgcttttcgtagtgtctgcaagtggacatttggagcgctttcaggcctgtggtggaaaacgaattatggtcacataaaaactggagagaagccttctcagaaacttctctgtgatgattgcattcaactcacagagttgaaccctcctatggatagagcagtgttgaaactctctttttgtggaatctgcaagtggatatgtggacctctccgaagatgtctttggaaacgggaatatcttcacataaaaactaaacagaagcattctcagaaacttcttggtgatgtttgcattcaaatcccagagttgaaccttcctttgatagttcaggtttgaaacactctttttgtaggatctgcaagtggctatttggaccattgtgtggccttcgttcgaaacgggtatatcttcgcataaaatctagacagaagcattctcagaaaatactttgtgatgattgagtttaaatcacagagctgaacattcctttggatggagcaggtttgagacacactttttgtagaatctacaagtggatatttggacctctctgaggatttcgttggaaacgggataactgcacctaactaaacggaagcattctcagaaactgctttgtgatgattgcattcacctcacagagttgaacattcctattgatagagcagtttggaaacactcttgttgtggaatgtgcaagtggagatttggagcgctttgaggcctatggtagtaaagggaatagcttcatagaaaaactagacagatgcattctcaggaactttttggtgatgtttgtattcaactcccagagttgaactttcctttggaaagagcagctatgaaacactctttttctagaatctgcaagtggacgtttggagggctttgtggtttgtggtggaaaaggaaatatcttcacctaaatactagatagaagcattctcagaagcttctctgtgatgactgcattcaactcacggagttgaacactccttttgagagcgcagttttgaaactctctttctgtggcatctgcaaggggacatgtagacctctttgaagatttcgttggaaacggaatcatcttcacataaaaactatacagaagcagtctcagaatcttctttgtgatgtttgcattcaaatcccagagttgaactttcctttcaaagttcacgtttgaaacactctttttgcaggatctacaagtggatatttggaccactctgtgtccttcgttcgaaacgggtatatcttcacacgacatctagacagaagctttctcagaaaattctttgggatgattgagtggaactcacagagctgaacattccttgcgatgtagcagtttagaaacacactttctgcagaatctgcaagtgcatatttggacctctctgaggaattcgttggaaacgggataatttcagctgactaaacagaagcattctcagaaccttcttcgtgatgtctgcattcaactcacagtgtggaacctttctttgatagttcaggtttgaaacactctttttgtagaaactgcaaggggataattgcacttctttgaggcctaccgtagtaaaggaaataacttcctatagaaagaagacagaaagcattctcagaaccctcttcgtgatgtttgcattcaactcacagtgctgaacctttctttgatagttcagctttgaaacactcttcttgtagaaactgcaagtggatatttggtcctctctgaggatttcgttggaaacgggataaaccgcacagaactaaacagagcattctcaaaaccttcttcgtgatgtttgcattcaactcacggtgttgaacctttctttgatagttcaggtttgaaacggtctgtctgtagaaactgcaagtagatatttggacctctctgaggatttcgttggaaacgggataaaccgcacagaactaaaacagaagcattcacagaaaactcttgttgacgactgagtttaactcacagagctgaacattcctttggatggagcagtttcgaaacacactatttgtagaatctgcaagtggatatttgggcctctctgaggatttcgttggaaacgggataaaacgcacagaactaaaacagaagcattctcagaaactactttgtgatgattgcattcaagtcacagagttgaacattccctttgacagagcagtttggaaactctctttgtgtagaatctgcaagtggagatatggaccgctttgaggcctatggtagtaaaggaaatagcttcatataaaagctagacagtagcattctcagaaacttctttgtgatgcttgcattcaactcacagagttgaactttcctttcgagagagaagctttgaaacactctttttccagaatctgcaagtggacatttggagggctttgaggcctgtggtggaaaaggaattaacttcccgtaaaagctagatagaagcattgtcagaaacttctttgtgatgattgcattcaactcacagagatgaaggttcctttacaaacagcagtttccaaacactctttctgtggaatctgcaagtggatatttggacctctttgaagatttcgttggaaacgggagaatcttcacagaaaagctaaacagaagcattctcagaaacttctctgtgatgtttgtgttcaactcccagagtttcacattgcttttcatagagtagttctgaaacatgcttttcgtagtgtctgcaagtggacatttggagcgctttcaggcctgtggtggaaaacgaattatggtcccataaaaactggagagagccttctcagaaacttctctgtgatgattgcattcaactcacagagttgaaccctcctatggatagagcagtgttgaaactctctttttgtggaatctgcaagtggatatgtggacctctccgaagatgtctttggaaacgggaatatcttcacataaaaactaaacagaagcattctcagaaacttcttggtgatgtttgcattccaatcccagagttgaaccttcctttgatagttcaggtttgaaacactctttttgtaggatctgcaagtggatatttggaccactctgtggccttcgttcgaaacgggtacatcttcgcataaaatgctagacagaagcattctcagaaaatactttgtgatgattgagttgaactcacagagctgaacattcctttggatggagcaggtttgagacacactttttgtagaatctacaagtggatatttggacctctctgaggatttcgttggaaacgggataactgcacctaactaaacggaagcattctcagaaactgctttgtgatgattgcattcacctcacagagttgaacattcctattgatagagcagtttggaaacactcttgttgtggaatgtgcaagtggagatttggagcgctttgaggcctatggtagtaaagggaatagcttcatagaaaaactagacagatgcattctcaggaactttttggtgatgtttgtattcaactcccagagttgaactttcctttggaaagagcatctatgaaacactctttttctagaatctgcaagtggacgtttggagggctttgtggtttgtggtggaaaaggaaatatcttcacctaaatactagatagaagcattctcagaagcttctctgtgatgactgcattcaactcacggagttgaacactccttttgagagcgcagttttgaaactctctttctgtggcatctgcaaggggacatgtagacctctttgaagatttcgttggaaacggaatcatcttcacataaaaactatacagaagcagtctcagaatcttctttgtgatgtttgcattcaaatcccagagttgaactttcctttcaaagttcacgtttgaaacactctttttgcaggatctacaagtggatatttggaccactctgtgtccttcgttcgaaacgggtatatcttcacacgacatctagacagaagctttctcagaaaattctttgggatgattgagtggaactcacagagctgaacattccttgcgatgtagcagtttagaaacacactttctgcagaatctgcaagtgcatatttggacctctctgaggaattcgttggaaacgggataatttcagctgactaaacagaagcattctcagaaccttcttcgtgatgtctgcattcaactcacagtgtggaacctttctttgatagttcaggtttgaaacactctttttgtagaaactgcaaggggataattgcacttctttgaggcctaccgtagtaaaggaaataacttcctatagaaagaagacagaagcattctcagaaccctcttcgtgatgtttgcattcaactcacagtgctgaacctttctttgatagttcagctttgaaacactcttcttgtagaaactgcaagtggatatttggtcctctctgaggatttcgttggaaacgggataaaccgcacagaactaaacagaagaattctcagagccctcttcgtgatgtttgcattcaactcacagtgctgaacctttctttgatagtgcagctttgaaacactctttttgtagaaactgcaagtggatgtttggtcctctctgaggatttcgttggaaacgggataaaccgcacagaactaaaacagaagcattgtcagaaacttctttgtgatgattgcattcaactcacagagttgaaggttccttttcaaacagcagtttccaatcactctttctgtggaatctgcaagtggatatttgggcctctctgaggatttcgttggaaacgggataaaacgcacagaactaaaacagaagcattctcagaaacttctctgtgatgtttgtgttcaactcccagagtttcacgttgcttttcatagagtagttctgaaacatgcttttcgtagtgtctgcaagtggacatttggagcgctttcaggcctgtggtggaaaacgaattatggtcacataaaaactggagagaagcattctcagaaaatactttgtgatgattgagtttaactcacagagctgaacattcctttggatggagcaggtttgagacacaccttttgtagaatctacaagtggatatttggacctctctgaggatttcgttggaaacgggataactgcacctaactaaacggaagcattctcagaaactgctttgtgatgattgcattcacctcacagagttgaacattcctattgatagagcagtttggaaacactcttgttgtggaatgtgcaagtggagatttggagcgctttgaggcctatggtagtaaagggaatagcttcatagaaaaactagacagatgcattctcaggtaactttttggtgatgtttgtattcaactcccagagttgaactttcctttggaaagagcagctatgaaacactctttttctagaatctgcaagtggacgtttggagggctttgtggtttgtggtggaaaaggaaatatcttcacctaaatactagatagaagcattctcagaagcttctctgtgatgactgcattcaactcacggagttgaacactccttttgagagcgcagttttgaaactctctttctgtggcatctgcaaggggacatgtagacctctttgaagatttcgttggaaacggaatcatctaacacataaaaactatacagaagcagtctcagaatcttctttgtgatgtttgcattcaaatcccagagttgaactttcctttcaaagttcacgtttgaaacactctttttgcaggatctacaagtggatatttggaccactctgtgtccttcgttcgaaacgggtatatcttcacacgacatctagacagaagctttctcagaaaattctttgggatgattgagtggaactcacagagctgaacattccttgcgatgtagcagtttagaaacacactttctgcagaatctgcaagtgcatatttggacctctctgaggaattcgttggaaacgggataatttcagctgactaaacagaagcattctcagaaccttcttcgtgatgtctgcattcaactcacagtgtggaacctttctttgatagttcaggtttgaaacactctttttgtagaaactgcaaggggataattgcacttctttgaggcctaccgtagtaaaggaaataacttcctatagaaagaagacagaagcattctcagaaccctcttcgtgatgtttgcattcaactcacagtgctgaacctttctttgatagttcagctttgaaacactcttcttgtagaaactgcaagtggatatttggtcctctctgaggatttccttggaaacgtgataaaccacacagaactaaacagaagcattcttagaaccttcttcgtgatgtttgcattcaactcacagtgttgaacctttctttgatagctcaggtttgaaacggtctttctgtagaaactgcaagtagatatttggacctctctgaggatttcgttggaaacgggataacccgcacagaactaaaacagaagcattcacagaaaactcttggtgacgactgagtttaactcacagagctgaagattcctttgaatggagcagtttcgaaacacactatttgtagaatctgcaagtggatatttgggcctctctgaggatttcgttgcaaacgggataaaccgcactgaactaaacagaagcattctcagaaactactttgtgatgattgcattcaagtcacagagttgaacattccctttgacagagcagtttggaaactctctttgtgtagaatctgcaagtggagatatggaccgctttgaggcctatggtagtaaaggaaatagcttcatataaaagctagacagtagcattctcagaaacttctttgtgatgcttgcattcaactcacagagttgaactttcctttcgagagagaagctttgaaacactctttttccagaatgtgcaagtggacatttggggagctttgaggcctgtggtggaaaaggaattatcttcccgtaaaagctagatagaagcattgtcagaaacttctttgtgatgattgcattcaactcacagagttgaaggttccttttcaaacagcagtttccaatcactctttctgtggaatctgcaagtggatatttcgacctctttgaagatttcgttggaaacgggagaatcttcacagaaaagctaaacagaagcattctcagaaacttctctgtgatgtttgtgttcaactcccagagtttcacgttgcttttcatagagtagttctgaaacatgcttctcgtagtgtctgcaagtggacatttggagcgctttcaggcctgtggtggaaaacgaattatggtcacataaaaactggagagaagccttctcagaaacttctctgtgatgattgcattcaactcacagagttgaaccctcctatggatagagcagtgttgaaactctctttttgtggaatctgcaagtggatatgtggacctctccgaagatgtctttggaaacgggaatatcttcacataaaaactaaacagaagcattctcagaaacttcttggtgatgtttgcattcaaatcccagagttgaaccttcctttgatagttcaggtttgaaacactctttttgtaggatctgcaagtggctatttggaccactctgtggccttcgttcgaaacgggtatatcttcgcataaaatctagacagaagcattctcagaaaatactttgtgatgattgagtttaaatcacagagctgaacattcctttggatggagcaggtttgagacacactttttgtagaatctacaagtggatatttggacctctctgaggatttctttggaaacgggataactgcacctaactaaacggaagcattctcagaaactgctttgtgatgattgcattcacctcacagagttgaacattcctattgatagagcagtttggaaacactcttgttgtggaatgtgcaagtggagatttggagcgctttgaggtctatggtagtaaagggaatagcttcatagaaaaactagacagatgcattctcaggaactttttggtgatgtttgtattcaactcccagagttgaactttcctttggaaagagcagctatgaaacactctttttctagaatctgcaagtggacgtttggagggctttgtggtttgtggtggaaaaggaaatatcttcacctaaatactagatagaagcatcctcagaagtcttctctgtgatgactgcattcaactcacggagttgaacactccttttgagagcgcagttttgaaactctctttctgtggcatctgcaaggggacatgtagacctctttgaagatttcgttggaaacggaatcatcttcacataaaaactatacagaagcagtctcagaatcttctttgtgatgtttgcattcaaatcccagagttgaactttcctttcaaagttcacgtttgaaacactctttttgcaggatctacaagtggatatttggaccactctgtgtccttcgttcgaaacgggtatatcttcacacgacatctagacagaagctttctcagaaaattctttgggatgattgagtggaactcacagagctgaacattccttgcgatgtagcagtttagaaacacactttctgcagaatctgcaagtgcatatttggacctctctgaggaattcgttggaaacgggataatttcagctgactaaacagaagcattctcagaaccttcttcgtgatgtctgcattcaactcacagtgtggaacctttctttgatagttcaggtttgaaacactctttttgtagaaactgcaaggggataattgcacttctttgaggcctaccgtagtaaaggaaataacttcctatagaaagaagacagaagcattctcagaaccctcttcgtgatgtttgcattcaactcacagtgctgaacctttctttgatagttcagctttgaaacactcttcttgtagaaactgcaagtggatatttggtcctctctgaggatttcgttggaaacgggataaaccgcacagaactaaacagaagaattctcagagccctcttcgtgatgtttgcattcaactcacagtgctgaacctttctttgatagtgcagctttgaaacactctttttgtagaaactgcaagtggatgtttggtcctctctgaggatttcgttggaaacgggataaaccgcacagaactaaaacagaagcattgtcagaaacttctttgtgatgattgcattcaactcacagagttgaaggttccttttcaaacagcagtttccaatcactctttctgtggaatctgcaagtggatatttgggcctctctgaggatttcgttggaaacgggataaaacgcacagaactaaaacagaagcattctcagaaacttctctgtgatgtttgtgttcaactcccagagtttcacgttgcttttcatagagtagttctgaaacatgcttttcgtagtgtctgcaagtggacatttggagcgctttcaggcctgtggtggaaaacgaattatggtcacataaaaactggagagaagccttctcagaaacttctctgtgatgattgcattcaactcacagagttgaaccctcctatggatagagcagtgttgaaactctctttttgtggaatctgcaagtggatatgtggacctctccgaagatgtctttggaaacgggaatatcttcacataaaaactaaacagaagcattctcagaaacttcttggtgatgtttgcattcaaatcccagagttgaaccttcctttgatagttcaggtttgaaacactctttttgtaggatctgcaagtggctatttggaccactctgtggccttcgttcgaaacgggtatatcttcgcataaaatctagacagaaacattctcagaaaatactttgtgatgattgagtttaaatcacagagctgaacattcctttggatggagcaggtttgagacacactttttgtagaatctacaagtggatatttggacctctctgaggatttcgttggaaacgggataactgcacctaactaaacggaagcattctcagaaactgctttgtgatgattgcattcacctcacagagttgaacattcctattgatagagcagtttggaaacactcttgttgtggaatgtgcaaatggagatttggagcgctttgaggcctatggtagtaaagggaatagcttcatagaaaaactagacagatgcattctcaggaactttttggtgatgtttgtattcaactcccagagttgaactttcctttggaaagagcagctatgaaacactctttttctagaatctgcaagtggacgtttggagggctttgtggtttgtggtggaaaaggatatatcttcacctaaatactagagagaagcattctcagaagcttctctgtgatgactgcattcaactcacggagttgaacactccttttgagagcgcagttttgaaactctctttctgtggcatccgcaaggggacatgtggacctctttgaagatttcgttggaaacggaatcatcttcacataaaaactatacagaagcagtctcagaatcttctttgtgatgtttgcattcaaatcccagagttgaactttcctttcaaagttcacgtttgaaacactctttttgcaggatctacaagtggatatttggaccactctgtgtccttcgttcgaaacgggtatatcttcacatgacatctagacagaagctttctcagaaaattctttgggatgattgagtggaactcacagagctgaacattccttgcgatgtagcagtttagaaacacactttctgcagaatctgcaagtgcatatttggacctctctgaggaattcgttggaaacgggataatttcagctgactaaacagaagcattctcagaaccttcttcgtgatgtctgcattcaactcacagtgtggaacctttctttgatagttcaggtttgaaacactctttttgtagaaactgcaaggggataattgcacttctttgaggcctaccgtagtaaaggaaataacttcctatagaaagaagacagaagcattctcagaatcctcttcgtgatgtttgcattcaactcacagtgctgaacctttctttgatagttcagctttgaaacactcttcttgtagaaactgcaagtggatatttggtcctctctgaggatttcgttggaaaagggataaaccgcacagaactaaacagaagcattctcagaaccttcttcgtgatgtttgcattcaactcacagtgttgaacctttctttcatagttcaggtttgaaacggtctttctgtagaaactgcaagtagatatttggacctctctgaggatttcgttggaaacgggataacccgcacagaactaaaacagaagcattcacagaaaactcttggtgacgactgagtttaactcacagagctgaacattcctttggatggagcagtttcgaaacacactatttgtagaatgtgcaagtggatatttgggcctctctgaggatttcgttggaaacgggataaaccgcacagaactaaacagaagcattctcagaaactactttgtgatgattgcattcaagtcacagagttgaacattccctttgacagagcagtttggaaactctctttgtgtagaatctgcaagtggagatatggaccgctttgaggcctatggtagtaaaggaaatagcttcatataaaagctagacagtagcattctcagaaacttctttgtgatgcttgcattcaactcacagagttgaaatttcctttcgagagagaagctttgaaacactctttttccagaatctgcaagtggacatttggagggctttgaggcctgtggtggaaaaggaattatcttcccgtaaaagctagatagaagcattgtcagaaacttctttgtgatgattgcattcaactcacagagttgaaggttccttttcaaagagcagtttccaatcactctttgtgtggaatctgcaagtggatatttggacctattttgaagatttcgttggaaacgggagaatcttcacaggaaagctaaacagaagcattctcagaaacttctctgtgatgtttgtgttcaactcccagagtttcacattgcttttcatagagtagttctgaaacatgcttttcgtagtgtctacaagtggacatttggagcgctttcaggcctgtggtggaaaacgaattatggtcacataaaaactggagagaagccttctcagaaacttctctgtgatgattgcattcaactcacagagttgaaccctcctatggatagagcagtgttgaaactctctttttgtggaatctgcaagtggatatgtggacctctccgaagatgtctttggaaacgggaatatcttcacataaaaactaaacagaagcattctcagaaacttcttggtgatgtttgcattcaaatcccagagttgaaccttcctttgatagttcaggtttgaaacactctttttgtaggatctgcaagtggatatttggaccactctgtggccttcgttcgaaacgggtacatcttcgcataaaatctagacagaagcattctcagaaaatactttgtgatgattgagtttaactcacagagctgaacattcctttggatggagcaggtttgagacacaccttttgtagaatctacaagtggatatttggacctctctgaggatttcgttggaaacgggataactgcacctaactaaacggaagcattctcagaaactgctttgtgatgattgcattcacctcacagagttgaacattcctattgatagagcagtttggaaacactcttcttgtggaatgtgcaagaggagatttggagcgctttgaggcctatggtagtaaagggaatagcttcatagaaaaactagacagatgcattctcaggaactttttggtgatgtttgtattcaactcccagagttgaactttcctttggaaagagcagctatgaaacactctttttctagaatctgcaagtggacgtttggagggctttgtggtttgtggtggaaaaggaaatatcttcacctaaatactagatagaagcattctcagaagcttctctgtgatgactgcattcaactcacggagttgaacactccttttgagagcgcagttttgaaactctccttctgtggcatccgcaaggggacatgtggacctctttgaagatttcgttggaaacggaatcatcttcacataaaaactatacagaagcagtctcagaatcttctttgtgatgtttgcattcaaatcccagagttgaactttcctttcaaagttcacgtttgaaacactctttttgcaggatctacaagtggatatttggaccactccgtgtcctccgttcgaaacgggtatatcttcacatgacatctagacagaagctttctcagaaaattctttgtgatgattgagttgagcaaacagagctgaacactccttgcgatgtagcagtttagaatcaccctttctgcagaatctgcaagtgcatatgtggacctctctgaggaattcgttggaaacgggataatttcagctgactaaacagaagcattctcagaaccttcttcgtgatgtctgcattcaactcacagtgtggaacctttctttgatagttcaggtttgaaacactctttttgtagaaactgcaaggggatcattgcacttctttgaggcctaccgtagtaaaggaaataacttcctataaaaagaagacagaagcattctcagaaccctcttcgtgatgtttgcattcaactcacggtgctgaacctttctttgatagttcagctttgaaacactctttttgtagaaactgcaagtggatatttggtcctctctgaggatttcgttggaaacgggataaaccgcacagaactaaacagaagcattctcagaaccttcttcgtgatgtttgcattcaactcacagtgttgaacctttctttgatagttcaggtttgaaacggtctttctgtagaaactgcaagtagatatttggacctctctgaggatttcgttggaaacgggataaaccgcacagaactaaaacagaagcattcacagaaaactcttggtgacgactgagtttaactcacagagctgaacattcctttggatggagcagtttcgaaacacactatttgtagaatgtgcaagtggatatgtgggcctctctgaggatttcgttggaaacgggataaaccgcacagaactaaacagaagcattctcagaaactactttgtgatgattgcattcaagtcacagagttgaacattccctttgacagagcagtttggaaactctctttgtgtagaatctgcaagtggagatatggaccgctttgaggcctatggtagtaaaggaaatagcttcatataaaagctagacagtagcattctcagaaacttctttgtgatgcttgcattcaactcacagagttgaactttcctttcgagagagaagctttgaaacactctttttccagaatctgcaagtggacatttggagggctttgaggcctgtggtggaaaaggaattatcttcccgtaaaagctagatagaagcattgtcagaaacttctttgtgatgattgcattcaactcacagagttgaaggttccttttcaaacagcagtttccaatcactctttctgtggaatctgcaagtggatatttggacctctttgaagatttcgttggaaacgggagtatcttcacagaaaagctaaacagaagcattctcagaaacttctctgtgatgtttgtgttcaactcccagagtttcacattgcttttcatagagtagttctgaaacatgcttttcgtagtgtctgcaagtggacatttggagcgctttcaggcctgtggtggaaaacgaattatggtcacataaaaactggagagaagccttctcagaaacttctctgagatgattgcattcaactcacagagttgaaccctcctatggatagagcagtgttgaaactctctttttgtggaatctgcaagcggatatgtggacctctccgaagatgtctttggaaacgggaatatcttcacataaaaactaaacagaagcattctcagaaacttcttggtgatgtttgcattcaaatcccagagttgaaccttcctttgatagttcaggtttgaaacactctttttgtaggatctgcaagtggctatttggaccactctgtggctttcgttcgaaacgggtatatcttcgcataaaatctagacagaagcattctcagaaaatactttgtgatgattgagtttaaatcacagagctgaacattcctttggatggagcaggtttgagacacactttttgtagaatctacaagtggatatttggacctctctgaggatttcgttggaaacgggataactgcacctaactaaacggaagcattctcagaaactgctttgtgatgattgcattcacctcacagagttgaacattcttattgatagagcagtttggaaacactcttgttgtggaatgtgcaagtggagatttggagcgctttgaggcctatggtagtaaagggaatagcttcatagaaaaactagacagatgcattctcaggaactttttggtgatgtttgtattcaactcccagagttgaactttcctttggaaagagcagctgtgaaacactctttttctagaatctgcaagaggacgtttggagggctttgtggtttgtgggggaaaaggaaatatcttcacctaaatactagatagaagcattctcagaagcttctctgtgatgactgcattcaactcacggagttgaacactccttttgagagcgcagttttgaaactctctttctgtggcatctgcaaggggacatgtagacctctttgaagatttcgttggaaacggaatcatcttcacataaaaactatacagaagcagtctcagaatcttctttgtgatgtttgcattcaaatcccagagttgaactttcctttcaaagttcacgtttgaaacactctttttgcaggatctacaagtggatatttggaccactctgtgtcctaagttcgaaacgggtatatcttcacatgacatctagacagaagctttctcagaaaattctttgggatgattgagtggaactcacagagctgaacattccttgcgatgtagcagtttagaaacacactttctgcagaatctgcaagtgcatatttggacctctctaaggaattcgttggaaacgtgataatttcagctgactaaacagaagcattctcagaaccttcttcgtgatgtctgcattcaactcacagtgtggaacctttctttgatagttcaggtttgaaacactctttttgtagaaactgcaaggggataattgcacttctttgaggcctaccgtagtaaaggaaataacttcctatagaaagaagacagaagcattctcagaaccctcttcgtgatgtttgcattcaactcacagtgctgaacctttctttgatagttcagctttgaaacactcttcttgtagaaactgcaagtggatatttggtcctctctgaggatttcgttggaaacgggataaaccgcacagaactaaacagaagaattctcagagccctcttcgtgatgtttgcattcaactcacagtgctgaacctttctttgatagtgcagctttgaaacactctttttgtagaaactgcaagtggatgtttggtcctctctgaggatttcgttggaaacgggataaaccgcacagaactaaaacagaagcattgtcagaaacttctttgtgatgattgcattcaactcacagagttgaaggttccttttcaaacagcagtttccaatcactctttctgtggaatctgcaagtggatatttgggcctctctgaggatttcgttggaaacgggataaaacgcacagaactaaaacagaagcattctcagaacttctctgtgatgtttgtgttcaactcccagagtttcacgttgcttttcatagagtagttctgaaacatgcttttcgtagtgtctgcaagtggacatttggagcgctttcaggcctgtggtggaaaacgaattatggtcacataaaaactggagagaagccttctcagaaacttctctgtgatgattgcattcaactcacagagttgaaccctcctatggatagagcagtgttgaaactctctttttgtcgaatctgcaagtggatatgtggacctctccgaagatgtctttggaaacgggaatatcttcacataaaaactaaacagaagcattctcagaaacttcttggtgatgtttgcattcaaatcccagagttgaaccttcctttgatagttcaggtttgaaacactctttttgtaggatctgcaagtggctatttggaccactctgtggccttcgttcgaaacgggtatatcttcgcataaaatctagacagaagcattctcagaaaatactttgtgatgattgagttgaactcacagagctgaacattcctttggatggagcaggtttgagacacactttttgtagaatctacaagtggatatttggacctctctgaggatttcgttggaaacgggataactgcacctaactgaacggaagcattctcagaaactgctttgtgatgattgcattcacctcacagagttgaacattcctattgatagagcagtttggaaacactcttgttgtggaatgtgcaagtggagatttggagcgctttgaggcctatggtagtaaagggaatagcttcatagaaaaactagacagatgcattctcaggaactttttggtgatgtttgtattcaactcccagagttgaactttcctttggaaagagcagctatgaaacactctttttctagaatctgcaagtggacgtttggagggctttgtggtttgtggtggaaaaggaaatatcttcacctaaatactagatagaagcattctcagaagcttctctgtgatgactgcattcaactcacggagttgaacactccttttgagagcgcagttttgaaactctctttctgtggcatctgcaaggggacatgtagacctctttgaagatttcgttggaaacggaatcatcttcacataaaaactatacagaagcagtctcagaatcttctttgtgatgtttgcattcaaatcccagagttgaactttcctttcaaagttcacgtttgaaacactctttttgcaggatctacaagtggatatttggaccactctgtgtccttcgttcgaaacgggtatatcttcacatgacatctagacagaagctttctcagaaaattctttgggatgattgagttgaactcacagagctgaacattccttgcgatatagcagtttagaaacacagtttctgcagaatctgcaagtgcatatttggacctctctgaggaattcgttggaaacgggataatttcagctgactaaacagaagcattctcagaaccttcttcgtgatgtctgcattcaactcacagtgtggaacctttctttgatagttcaggtttgaaacactctttttgtagaaactgcaaggggataattgcacttctttgaggcctaccgtagtaaaggaaataacttcctatagaaagaagacagaagcattctcagaaccctcttcgtgatgtttgcattcaactcacagtgctgaacctttctttgatagttcagctttgaaacactcttcttgtagaaactgcaagtggatatttggtcctctctgaggatttcgttggaaacgggataaaccgcacagaactaaacagaagaattctcagagccctcttcgtgatgtttgcattcaactcacagtgctgaacctttctttgatagtgcagctttgaaacactctttttgtagaaactgcaagtggatgtttggtcctctctgaggatttcgttggaaacgggataaaccgcacagaactaaaacagaagcattcacagaaaactcttggtgacgactgagtttaactcacagagctgaacattcctttggatggagcagtttcgaaacacactatttgtagaatctgcaagtggatatttgggcctctctgaggatttcgttggaaacgggataaaacgcacagaactaaaacagaagcattctcagaaactactttgtgatgattgcattcaagtcacagagttgaacattccctttgacagagcagtttggaaactctctttgtgtagaatctgcaagtggagatatggaccgctttgaggcctatggtagtaaaggaaatagcttcatataaaagctagacagtagcattctcagaaacttctttgtgatgcttgcattcaactcacagagttgaactttcctttcgagagagaagctttgaaacactctttttccagaatgtgcaagtggacatttggggagctttgaggcctgtggtggaaaaggagttatcttcccgtaaaagctagatagaagcattgtcagaaacttctttgtgatgattgcattcaactcacagagttgaaggttccttttcaaacagcagtttccaatcactctttctgtggaatctgcaagtggatatttcgacctctttgaagatttcgttggaaacgggagaatcttcacagaaaagctaaacagaagcattctcagaaacttctctgtgatgtttgtgttcaactcccagagtttcacgttgcttttcatagagtagttctgaaacatgcttttcgtagtgtctgcaagtggacatttggagcgctttcaggcctgtggtggaaaacgaattatggtcacataaaaactggagagaagccttctcagaaacttctctgtgatgattgcattcaactcacagagttgaaccctcctatggatagagcagtgttgaaactctctttttgtggaatctgcaagtggatatgtggacctctccgaagatgtctttggaaacggcaatatcttcacataaaaactaaacagaagcagtctcagaatcttctttgtgatgtttgcattcaaatcccagagttgaactttcctttcaaagttcacgtttgaaacactctttttgtaggatctgcaagtggatatttggaccactctgtggccttcgttcgaaacgggtatatcttcgcataaaatctagacagaagctttctcagaaaattctttgtgatgattgagtggaactcacagagctgaacattccttgcgatgtagcagtttagaaacacactttctgcagaatctgcaagtgcatatttggacctctctgaggaattcgttggaaacgggataatttcagctgactaaacagaagcattctcagaaccttcttcgtgatgtctgcattcaactcacagtgtggaacctttctttgatagttcaggtttgaaacactctttttgtagaaactgcaaggggataattgcacttctttgaggcgtaccgtagtaaaggaaataacttcctatagaaagaagacagaagaattctcagagccctcttcgtgatgtttgcattcaactcacagtgctgaacctttctttgatagtgcagctttgaaacactctttttgtagaaactgcaagtggatgtttggtcctctctgaggatttcgttggaaacgggataaaccgcacagaactaaaacagaagcattgtcagaaacttctttgtgatgattgcattcaactcacagagttgaaggttccttttcaaacagcagtttccaatcactctttctgtggaatctgcaagtggatatttgggcctctctgaggatttcgttggaaacgggataaaacgcacagaactaaaacagaagcattctcagaaacttctctgtgatgtttgtgttcaactcccagagtttcacgttgcttttcatagagtagttctgaaacatgcttttcgtagtgtctgcaagtggacatttggagcgctttcaggcctgtggtggaaaacgaattatggtcacataaaaactggagagaagccttctcagaaacttctctgtgatgattgcattcaactcacagagttgaaccctcctatggatagagcagtgttgaaactctctttttgtggaatctgcaagtggatatgtggacctctccgaagatgtctttggaaacgggaatatcttcacataaaaactaaacagaagcattctcagaaacttcttggtgatgtttgcattcaaatcccagagttgaaccttcctttgatagttcaggtttgaaacactctttctgtaggatctgcaagtggctatttggaccactctgtggccttcgttcgaaacgggtatatcttcgcataaaatctagacagaagcattctcagaaaatactttgtgatgattgagtttaaatcacagagctgaccattcctttggatggagcaggtttgagacacactttttgtagaatctacaagtggatatttggacctctctgaggatttcgttggaaacgggataactgcacctaactaaacggaagcattctcagaaactgctttgtgatgattgcattcacctcacagagttgaacattcctattgatagagcagtttggaaacactcttgttgtggaatgtgcaagtggagatttggagcgctttgaggcctatggtagtaaagggaatagcttcatagaaaaactagacagatgcattctcaggaaccttttggtgatgtttgtattcaactcccagagttgaactttcctttggaaagagcagctatgaaacactctttttctagaatctgcaagtggacgtttggagggctttgtggtttgtggtggaaaaggaaatatcttcacctaaatactagatagaagcattctcagaagcttctctgtgatgactgcattcaactcacggagttgaacactccttttgagagcgcagttttgaaactctctttctgtggcatctgcaaggggacatgtagacctctttgaagatttcgttggaaacggaatcatcttcacataaaaactatacagaagcagtctcagaatcttctttgtgatgtttgcattcaaatcccagagttgaactttcctttcaaagttcacgtttgaaacactctttttgcaggatctacaagtggatatttggaccactctgtgtccttcgttcgaaacgggtatatcttcacacgacatctagacagaagctttctcagaaaattctttgggatgattgagtggaactcacagagctgaacattccttgcgatgtagcagtttagaaacacactttctgcagaatctgcaagtgcatatttggacctctctgaggaattcgttggaaacgggataatttcagctgactaaacagaagcattctcagaaccttcttcgtgatgtctgcattcaactcacagtgtggaacctttctttgatagttcaggtttgaaacactctttttgtagaaactgcaaggggataattgcacttctttgaggcctaccgtagtaaaggaaataacttcctatagaaagaagacagaagcattctcagaaccctcttcgtgatgtttgcattcaactcacagtgctgaacctttctttgatagttcagctttgaaacactcttcttgtagaaactgcaagtggatatttggtcctctctgaggatttcgttggaaacgggataaaccgcacagaactaaacagaagaattctcagagccctcttcgtgatgtttgcattcaactcacagtgctgaacctttctttgatagtgcagctttgaaacactctttttgtagaaactgcaagtggatgtttggtcctctctgaggatttcgttggaaacgggataaaccgcacagaactaaaacagaagcattgtcagaaacttctttgtgatgattgcattcaactcacagagttgaaggttccttttcaaacagcagtttccaatcactctttctgtggaatctgcaagtggatatttgggcctctctgaggatttcgttggaaacgggataaaacgcacagaactaaaacagaagcattctcagaaacttctctgtgatgtttgtgttcaactcccagagtttcacgttgcttttcatagagtagttctgaaacatgcttttcgtagtgtctgcaagtggacatttggagcgctttcaggcctgtggtggaaaacgaattatggtcacataaaaactggagagaagccttctcagaaacttctctgtgatgattgcattcaactcacagagttgaaccctcctatggatagagcagtgttgaaactctctttttgtggaatctgcaagtggatatgtggacctctccgaagatgtctttggaaacgggaatatcttcacataaaaactaaacagaagcattctcagaaacttcttggtgatgtttgcattcaaatcccagagttgaaccttcctttgatagttcaggtttgaaacactctttttgtaggatctgcaagtggctatttggaccactctgtggccttcgttcgaaacgggtatatcttcgcataaaatctagacagaagcattctcagaaaatactttgtgatgattgagtttaaatcacagagctgaccattcctttggatggagcaggtttgagacacactttttgtagaatctacaagtggatatttggacctctctgaggatttcgttggaaacgggataactgcacctaactaaacggaagcattctcagaaactgctttgtgatgattgcattcacctcacagagttgaacattcctattgatagagcagtttggaaacactcttgttgtggaatgtgcaagtggagatttggagcgctttgaggcctatggtagtaaagggaatagcttcatagaaaaactagacagatgcattctcaggaactttttggtgatgtttgtattcaactcccagagttgaactttcctttggaaagagcagctatgaaacactctttttctagaatctgcaagtggacgtttggagggctttgtggtttgtggtggaaaaggaaatatcttcacctaaatactagatagaagcattctcagaagcttctctgtgatgactgcattcaactcacggagttgaacactccttttgagagcgcagttttgaaactctctttctgtggcatctgcaaggggacatgtagacctctttgaagatttcgttggaaacggaatcatcttcacatcaaaactatacagaagcagtctcagaatcttctttgtgatgtttgcattcaaatcccagagttgaactttcctttcaaagttcacgtttgaaacactctttttgcaggatctacaagtggatatttggaccactctgtgtccttcgttcgaaacgggtatatcttcacatgacatctagacagaagctttctcagaaaatcctttgggatgattgagtggaactcacagagctgaacattccttgcgatgtagcagtttagaaacacactttctgcagaatctgcaagtgcatatttggacctctctgaggaattcgttggaaacgggataatttcagctgactaaacagaagcattctcagaaccttcttcgtgatgtctgcattcaactcacagtgtggaacctttctttgatagttcaggtttgaaacactctttttgtagaaactgcaaggggataattgcacttctttgaggcctaccgtagtaaaggaaataacttcctatagaaagaagacagaagcattctcagaaccctcttcgtgatgtttgcattcaactcacagtgctgaacctttctttgatagttcagctttgaaacactcttcttgtagaaactgcaagtggatatttggtcctctctgaggatttcgttggaaacgggataaaccgcacagaactaaacagaagcattctcagagccctcttcgtgatgtttgcattcaactcacagtgctgaacctttctttgatagtgcagctttgaaacactctttttgtagaaactgcaagtggatgtttggtcctctctgaggatttcgttggaaacgggataaaccgcacagaactaaaacagaagcattcacagaaaactcttggtgacgactgagtttaactcacagagctgaacattcctttggatggagcagtttcgaaacacactatttgtagaatctgcaagtggatatttgggcctctctgaggatttcgttggaaacgggataaaacgcacagaactaaaacagaagcattctcagaaactactttgtgatgattgcattcaagtcacagagttgaacattccctttgacagagcagtttggaaactctctttgtgtagaatctgcaagtggagatatggaccgctttgaggcctatggtagtaaaggaaatagcttcatataaaagctagacagtagcattctcagaaacttctttgtgatgcttgcattcaactcacagagttgaactttcctttcgagagagaagctttgaaacactctttttccagaatgtgcaagtggacatttggggaggtttgaggcctggggtggaaaaggaattatcttcccgtaaaagctagatagaagcattgtcagaaacttctttgtgatgattgcattcaactcacagagttgaaggttccttttcaaacagcagtttccaatcactctttctgtggaatctgcaagtggatatttcgacctctttgaagatttcgttggaaacgggagaatcttcacagaaaagcttaacagaagcattctcagaaacttctctgtgatgtttgtgttcaactcccagagtttcacgttgcttttcatagagtagttctgaaacatgcttttcgtagtgtctgcaagtggacatttggagcgctttcaggcctgtggtggaaaacgaattatggtcacataaaaactggagagaagccttctcagaaacttctctgtgatgattgcattcaactcacagagttgaaccctcctatggatagagcagtgttgaaactctctttttgtggaatctgcaagtggatatgtggacctctccgaagatgtctttggaaacgggaatatcttcacataaaaactaaacagaagcattctcagaaacttcttggtgatgtttgcattcaaatcccagagttgaaccttcctttgatagttcaggtttgaaacactctttttgtaggatctgcaattggctatttggaccactctgtggccttcgttcgaaacgggtatatcttcgcataaaatctagacagaagcattctcagaaaatactttgtgatgattgagtttaaatcacagagctgaccattcctttggatggagcaggtttgagacacactttttgtagaatctacaagtggatatttggacctctctgaggatttcgttggaaacgggataactgcacctaactaaacggaagcattctcagaaactgctttgtgatgattgcattcacctcacagagttgaacattcctattgatagagcagtttggaaacactcttgttgtggaatgtgcaagtggagatttggagcgctttgaggcctgtggtagtaaagggaatagcttcatagaaaaactagacagatgcattatcaggaacttctttttggtgatgtttgtattcaactcccagagttgaactttcttttggaaagagcagctatgaaacactctttttctagaatctgcaagtggacgtttggagggctttgtggtttgtggtggaaaaggaaatatcttcacctaaatactagatagaagcattctcagaagcttctctgtgatgactgcattcaactcacggagttgaacactccttttgagagcgcagttttgaaactctctttctgtggcatctgcaaggggacatgtagacctctttgaagatttcgttggaaacggaatcatcttcacataaaaactatacagaagcagtctcagaatcttctttgtgatgtttgcattcaaatcccagagttgaactttcctttcaaagttcacgtttgaaacactctttttgcaggatctacaagtggatatttggaccactctgtgtccttcgttcgaaacgggtataacttcacacgacatctagacagaagctttctcagaaaattctttgggatgattgagtggaactcacagagctgaacattccttgcgatgtagcagtttagaaacacactttctgcagaatctgcaagtgcatatttggacctctctgaggaattcgttggaaacgggataatttcagctgactaaacagaagcattctcagaaccttcttcgtgatgtctgcattcaactcacagtgtggaacctttctttgatagttcaggtttgaaacactctttttgtagaaactgcaaggggataattgcacttctttgaggcctaccgtagtaaaggaaataacttcctatagaaagaagacagaagcattctcagaaccctcttcgtgatgtttgcattcaactcacagtgctgaacctttctttgatagttcagctttgaaacactcttcttgtagaaactgcaagtggatatttggtcctctctgaggatttcgttggaaacgggataaaccgcacagaactaaacagaagaattctcagagccctcttcgtgatgtttgcattcaactcacagtgctgaacctttctttgatagtgcagctttgaaacactctttttgtagaaactgcaagtggatgtttggtcctctctgaggatttcgttggaaacgggataaaccgcacagtaactaaaacagaagcattctcagaaccttcttcgtgatgtttgcattcaactcacagtgttgaacctttctttcatagttcaggtttgaaacggtctttctgtagaaactgcaagtagatatttggacctctctgaggatttcgttggaaacgggataaaccgcacagaactaaaacagaagcattcacagaaaactcttggtgacgactgagtttaactcacagagctgaacattcctttggatggagcagtttcgaaacacactatttgtagaatgtgcaagtggatatttgggcctctctgaggatttcgttggaaacgggataaaccgcacagaactaaacagaagcattctcagaaactactttgtgatgattgcattcaagtcacagagttgaacattccctttgacagagcagtttggaaactctctttgtgtagaatctgcaagtggagatatggaccgctttgaggcctatggtagtaaaggaaatagcttcatataaaagctagacattagcattctcagaaacttctttgtgatgcttgcattcaactcacagagttgaactttcctttcgagagagaagctttgaaacactctttttccagaatgtgcaagtggacatttggtgggctttgaggcctgtggtggaaaaggaattatcttcccgtaaaagctagatagaagcattgtcagaaacttctttgtgatgattgcattcaactcacagagttgaaggttccttttcaaagagcagtttccaatcactctttctgtggaatctgcaagtggatatttcgacctattttgaagatttcgttggaaacgggataatcttcacagaaaagctaaacagaagcattctcagaaacttctctgtgatgtttgtgttcaactcccagagtttcacattgcttttcatagagtagttctgaaacatgcttttcgtagtgtctacaagtggacatttggagcgcttccaggcctgtggtggaaaacgaattatggtcacataaaaactggagagaagccttctcagaaacttctctgtgatgattgcattcaactcacagagttgaaccctcctatggatagagcagtgttgaaactctctttttgtggaatctgcaagtggatatgtggacctctccgaagatgtctttggaaacgggaatatcttcacataaaaactaaacagaagcattctcagaaacttcttggtgatgtttgcattcaaatcccagagttgaaccttcctttgatagttcaggtttgaaacactctttctgtaggatctgcaagtggctatttggaccactctgtggccttcgttcgaaacgggtatatcttcgcataaaatctagacagaagcattctcagaaaatactttgtgatgattgagtttaaatcacagagctgaccattcctttggatggagcaggtttgagacacactttttgtagaatctacaagtggatatttggacctctctgaggatttcgttggaaacgggataactgcacctaactaaacggaagcattctcagaaactgctttgtgatgattgcattcacctcacagagttgaacattcctattgatagagcagtttggaaacactcttgttgtggaatgtgcaagtggagatttggagcgctttgaggcctatggtagtaaagggaatagcttcatagaaaaactagacagatgcattctcaggaactttttggtgatgtttgtattcaactcccagagttgaactttcctttggaaagagcagctatgaaacactctttttctagaatctgcaagtggacgtttggagggctttgtggtttgtggtggaaaaggaaatatcttcacctaaatactagatagaagcattctcagacgcttctctgtgatgactgcattcaactcacggagttgaacactccttttgagagcgcagttttgaaactctctttctgtggcatctgcaaggggacatgtagacctctttgaagatttcgttggaaacggaatcatcttcacataaaaactatacagaagcagtctcagaatcttctttgtgatgtttgcattcaaatcccagagttgaactttcctttgaaagttcacgtttgaaacactctttttgcaggatctacaagtggatatttggaccactctgtgtccttcgttcgaaacgggtatatcttcacacgacatctagacagaagctttctcagaaaattctttgggatgattgagtggaactcacagagctgaacattccttgcgatgtagcagtttagaaacacactttctgcagaatctgcaagtgcatatttggacctctctgaggaattcgttggaaacgggataatttcagctgactaaacagaagcattctcagaacttcttcgtgatgtctgcattcaactcacagtgtggaacctttctttgatagttcaggtttgaaacactctttttgtagaaactgcaaggggataattgcacttctttgaggcctaccgtagtaaaggaaataacttcctatagaaagaagacagaagcattctcagaaccctcttcgtgatgtttgcattcaactcacagtgctgaacctttctttgatagttcagctttgaaacactcttcttgtagaaactgcaagtggatatttggtcctctctgaggatttcgttggaaacgggataaaccgcacagaactaaacagaagaattctcagagccctcttcgtgatgtttgcattcaactcacagtgctgaacctttctttgatagtgcagctttgaaacactctttttgtagaaactgcaagtggatgtttggtcctctctgaggatttcgttggaaacgggataaaccgcacagaactaaaacagaagcattgtcagaaacttctttgtgatgattgcattcaactcacagagttgaaggttccttttcaaacagcagtttccaatcactctttctgtggaatctgcaagtggatatttgggcctctctgaggatttcgttggaaacgggataaaacgcacagaactaaaacagaagcattctcagaaacttctctgtgatgtttgtgttcaactcccagagtttcacgttgcttttcatagagtagttctgaaacatgcttttcgtagtgtctgcaagtggacatttggagcgctttcaggcctgtggtggaaaacgaattatggtcacataaaaactggagagaagccttctcagaaacttctctgtgatgattgcattcaactcacagagttgaaccctcctatggatagagcagtgttgaaactctctttttgtggaatctgcaagtggatatgtggacctctccgaagatgtctttggaaacgggaatatcttcacataaaaactaaacagaagcattctcagaaacttcttggtgatgtttgcattcaaatcccagagttgaaccttcctttgatagttcaggtttgaaacactctttctgtaggatctgcaagtggctatttggaccactctgtggccttcgttcgaaacgggtatatcttcgcataaaatctagacagaagcattctcagaaaatactttgtgatgattgagtttaaatcacagagctgaccattcctttggatggagcaggtttgagacacactttttgtagaatctacaagtggatatttggacctctctgaggatttcgttggaaacgggataactgcacctaactaaacggaagcattctcagaaactgctttgtgatgattgcattcacctcacagagttgaacattcctattgatagagcagtttggaaacactcttgttgtggaatgtgcaagtggagatttggagcgctttgaggcctgtggtagtaaagggaatagcttcatagaaaaactagacagatgcattctcaggaactttttggtgatgtttgtattcaactcccagagttgaactttcctttggaaagagcagctatgaaacactctttttctagaatctgcaagtggacgtttggagggctttgtggtttgtggtggaaaaggaaatatcttcacctaaatactagatagaagcattctcagaagcttctctgtgatgactgcattcaactcacggagttgaacactccttttgagagcgcagttttgaaactctctttctgtggcatctgcaaggggacatgtagacctctttgaagatttcgttggaaacggaatcatcttcacataaaaactatacagaagcagtctcagaatcttctttgtgatgtttgcattcaaatccccgagttgaactttcctttcaaagttcacgtttgaaacactctttttgcaggatctacaagtggatatttggaccactctgtgtccttcgttcgaaacgggtatatcttcacatgacatctagacagaagctttctcagaaaattctttgggatgattgagttgaactcacagagctgagcattccttgcgatgtagcagtttagaaacgcactttctgcagaatctgcaagtgcatatttggacctctgtgaggaattcgttggaaacgggataatttcagctgactaaacagaagcattctcagaaccttcttcgtgatgtctgcattcaactcacagtgtggaacctttctttgatagttcaggtttgaaacactctttttgtagaaactgcaaggggataattgcacttctttgaggcctaccgtagtaaaggaaataacttcctatagaaagaagacagaagcattctcagaaccctcttcgtgatgtttgcattcaactcacagtgctgaacctttctttgatagttcagctttgaaacactcttcttgtagaaactgcaagtggatatttggtcctctctgaggatttcgttggaaacgggataaaccgcacagaactaaacagaagaattctcagagccctcttcgtgatgtttgcattcaactcacagtgctgaacctttctttgatagtgcagctttgaaacactctttttgtagaaactgcaagtggatgtttggtcctctctgaggatttcgttggaaacgggataaaccgcacagaactaaaacagaagcattgtcagaaacttctttgtgatgattgcattcaactcacagagttgaaggttccttttcaaacagcagtttccaatcactctttctgtggaatctgcaagtggatatttgggcctctctgaggatttcgttggaaacgggataaaacgcacagaactaaaacagaagcattctcagaaacttctctgtgatgtttgtgttcaactcccagagtttcacgttgcttttcatagagtagttctgaaacatgcttttcgtagtgtctgcaagtggacatttggagcgctttcaggcctgtggtggaaaacgaattatggtcacataaaaactggagagaagccttctcagaaacttctctgtgatgattgcattcaactcacagagttgaaccctcctatggatagagcagtgttgaaactctctttttgtggaatctgcaagtggatatgtggacctctccgaagatgtctttggaaacgggaatatcttcacataaaaactaaacagaagcattctcagaaacttcttggtgatgtttgcattcaaatcccagagttgaaccttcctttgatagttcaggtttgaaacactctttctgtaggatctgcaagtggctatttggaccactctgtggccttcgttcgaaacgggtatatcttcgcataaaatctagacagaagcattctcagaaaatactttgtgatgattgagtttaaatcacagagctgaccattcctttggatggagcaggtttgagacacactttttgtagaatctacaagtggatatttggacctctctgaggatttcgttggaaacgggataactgcacctaactaaacggaagcattctcagaaactgctttgtgatgattgcattcacctcacagagttgaacattcctattgatagagcagtttggaaacactcttgttgtggaatgtgcaagtggagatttggagcgctttgaggtctatggtagtaaagggaatagcttcatagaaaaactagacagatgcattctcaggaaccttttggtgatgtttgtattcaactcccagagttgaactttcctttggaaagagcagctatgaaacactctttttctagaatctgcaagtggacgtttggagggctttgtggtttgtggtggaaaaggaaatatcttcacctaaatactagatagaagcattctcagaagcttctctgtgatgactgcattcaactcacggagttgaacactccttttgagagcgcagttttgaaactctctttctgtggcatctgcaaggggacatgtagacctctttgaagatttcgttggaaacggaatcatcttcacataaaaactatacagaagcagtctcagaatcttctttgtgatgtttgcattcaaatcccagagttgaactttcctttcaaagttcacgtttgaaacactctttttgcaggatctacaagtggatatttggaccactctgtgtccttcgttcgaaacgggtatatcttcacacgacatctagacagaagctttctcagaaaattctttgggatgattgagtggaactcacagagctgaacattccttgcgatggagcagtttagaaacacactttctgcagaatctgcaagtgcatatttggacctctctgaggaattcgttggaaacgggataatttcagctgactaaacagaagcattctcagaaccttcttcgtgatgtctgcattcaactcacagtgtggaacctttctttgatagttcaggtttgaaacactctttttgtagaaactgcaaggggataattgcacttctttgaggcctaccgtagtaaaggaaataacttcctatagaaagaagacagaagcattctcagaaccctcttcgtgatgtttgcattcaactcacagtgctgaacctttctttgatagttcagctttgaaacactcttcttgtagaaactgcaagtggatatttggtcctctctgaggatttcgttggaaacgggataaaccgcacagaactaaacagaagaattctcagagccctcttcgtgatgtttgcattcaactcacagtgctgaacctttctttgatagtgcagctttgaaacactctttttgtagaaactgcaagtggatgtttggtcctctctgaggattttgttggaaacgggataaaccgcacagaactaaaacagaagcattgtcagaaacttctttgtgatgattgcattcaactcacagagttgaaggttccttttcaaacagcagtttccaatcactctttctgtggaatctgcaagtggatatttgggcctctctgaggatttcgttggaaacgggataaaacgcacagaactaaaacagaagcattctcagaaacttctctgtgatgtttgtgttcaactcccagagtttcacgttgcttttcatagagtacttctgaaacatgcttttcgtagtgtctgcaagtggacatttggagcgctttcaggcctgtggtggaaaacgaattatggtcacataaaaactggagagaagccttctcagaaacttctctgtgatgattgcattcaactcacagagttgaaccctcctatggatagagcagtgttgaaactctctttttgtggaatctgcaagtggatatgtggacctctccgaagatgtctttggaaacgggaatatcttcacataaaaactaaacagaagcattctcagaaacttcttggtgatgtttgcattcaaatcccagagttgaaccttcctttgatagttcaggtttgaaacactctttctgtaggatctgcaagtggctatttggaccactctgtggccttcgttcgaaacgggtatatcttcgcataaaatctagacagaagcattctcagaaaatactttgtgatgattgagtttaaatcacagagctgaccattcctttggatggagcaggtttgagacacactttttgtagaatctacaagtggatatttggacctctctgaggatttcgttggaaacgggataactgcacctaactaaacggaagcattctcagaaactgctttgtgatgattgcattcacctcacagagttgaacattcctattgatagagcagtttggaaacactcttgttgtggaatgtgcaagtggagatttggagcgctttgaggcctatggtagtaaagggaatagcttcatagaaaaactagacagatgcattctcaggaactttttggtgatgtttgtattcaactcccagagttgaactttcctttggaaagagcagctatgaaacactctttttctagaatctgcaagtggacgtttggagggctttgtggtttgtggtggaaaaggaaatatcttcacctaaatactagatagaagcattctcagaagcttctctgtgatgactgcattcaactcacggagttgaacactccttttgagagcgcagttttgaaactctctttctgtggcatctgcaaggggacatgtagacctctttgaagatttcgttggaaacggaatcatcttcacataaaaactatacagaagcagtctcagaatcttctttgtgatgtttgcattcaaatcccagagttgaactttcctttcaaagttcacgtttgaaacactctttttgcaggatctacaagtggatatttggaccactctgtgtccttcgttcgaaacgggtatatcttcacacgacatctagacagaagctttctcagaaaattctttgggatgattgagtggaactcacagagctgaacattccttgcgatgtagcagtttagaaacacactttctgcagaatctgcaagtgcatatttggacctctctgaggaattcgttggaaacgggataatttcagctgactaaacagaagcattctcagaaccttcttcgtgatgactgcattcaactcacagtgtggaagctttctttgatagttcagctttgaaacactctttttgtagaaactgcaaggggataattgcacttctttgaggcctaccgtactaaaggaaataacttcctataaaaagaagacagaagcattctcagaaccctcttcgtgatgtttgcattcaactcacagtgctgaacctttctttgatagttcagctttgaaacactctttttgtagaaactgcaagtggatatttggtcctctgtgaggatttcgttggaaacgggataaaccgcacagaactaaacagaagcatcctcagaaccttcttcgtgatgtttgcattcaactcacagtgctgaacctttctttaatagttcagctttgaaacactctttttgtagaaactgcaagtggatatttggacctctctgaggatttcgttggaaacgggataaaccgcacagaactaaaacagaagcattcacagaaaaactctttgtgacgactgcgtttaactcacagagctgaaaatccctttggatggagcagtttcgaaaaacactatttgtagaatgtgcaagtggatattggggcctctctgaggatttcgttggaaacgggataaaccacacagaactaaacagaagcattctcagaaactactttgtgatgattgcattcaagtcacagagctgaacattccctttgacagagcagtttggaaactctctttgtgtagaatctgcaagtggagatatggaatgctttgaggactatggtagtaaaggaaatagcttcatagaaaagctagacagtagcattctcagaaactgctttgtgatgattgcattcacctcacagagttgaccattcccattgatagagcagtttggaaacactcttgttgtggaatgtgcaagtggagatttggagcgctttgaggtctatggtagtaaagggaatagcttcatagaaaaactagacagatgcattctcaggaactttttggtgatgtttgtattcaactcccagagttgaactttcctttggaaagagcagctatgaaacactctttttctagaatctgcaagtggacgattggagggctttgtggtttttggtggaaaaggaaatatcttcacctaaatagtagatagaagcattctcagaagcttctctgtgatgactgcattcaactcacggagttgaacactccttttgagagcgcagttttgaaactctctttctgtggcatctgcaaggggacatgtagacctctttgaagatttcgttggaaacggaatcatcctcacatcaaaactatacagaagcagtctcagaatcttctttgtgatgtttgcattcaaatcccagagttgaactttcctttcaaagttcacgtttgaaacactctttttgcaggatctacaagtggatatttggaccactctgtgtccttcgttcgaaacgggtatatcttcacatgacatctagacagaagctttctcagaaaattctttgggatgattgagtggagcaaacagagctgaacactccttgcgatgtagcagtttagaaacaccctttctgcagaatctgcaagtgcatatgtggacctctctgaggaattcgttggaaacgggataatttcagctgactaaacagaagcattctcagaaccttcctcgtgatgtctgcattcaactcacagtgtggaacctttctttgatagttcaggtttgaaacactctttttgtagaaactgcaaggggatcattgcacttctttgaggcctaccgtagtaaaggaaataacttcctataaaaagaagacagaagcattctcagaaccctcttcgtgatgtttgcattcaattcacggtgctgaacctttctttgatagttcagctttgaaacactctttttgtagaaactgcaagtggatatttggtcctctctgaggatttcgttggaaacgggataaaccgcacagaactatacagaagcattctcagaaccttcttcgtgatgtttgcattcaactcacagtgttgaacctttctttgatagttcaggtttgaaacggtctttctgtagaaactgcaagtagatatttggacctctctgaggatttcgttggaaacgggataaaccgcacagaactaaaacagaagcattcacagaaaactcttggtgacgactgagtttaactcacagagctgaacattcctttggatggagcagtttcgaaacacactatttgtagaatgtgcaagtggatatttgggcctctctgaggatttccttggaaacgggataaaccgcacagaactaaacagaagcattctcagaaactactttgtgatgattgcattcaagtcacagagttgaacattccctttgacagagcagtttggaaactctctttgtgtagaatctgcaagtggagatatggaccgctttgaggcctatggtagtaaaggaaatagcttcatataaaagctagacagtagcattctcagaaacttctttgtgatgcttgcattcaactcacagagttgaactttcctttcgagagagaagctttgaaacactctttttccagaatctgcaagtggacatttggagggctttgaggcctgtggtggaaaaggaattatcttcccgtaaaagctagatagaagcattgtcagaaacttctttgtgatgattgcattcaactcacagagttgaaggttccttttcaaagagcagtttccaatcactctttgtgtggaatctgcaagtggatatttggacctattttgaagatttcgttggaaacgggagaatcttcacaggaaagctaaacagaagcattctcagaaacttctctgtgatgtttgtgttcaactcccagagtttcacattgcttttcatagagtagttctgaaacatgcttttcgtagtgtctacaagtggacatttggagcgctttcaggcctgtggtggaaaacgaattatggtcacataaaaactggagagaagccttctcagaaacttctctgtgatgattgcattcaactcacagagttgaaccctcctatggatagagcagtgttgaaactctctttttgtggaatctgcaagtggatatgtggacctctccgaagatgtctttggaaacgggaatatcttcacataaaaactaaacagaagcattctcagaaacttcttggtgatgtttgcattcaaatcccagagttgaaccttcctgtgatagttcaggtttgaaacactctttttgtaggatctgcaagtggatatttggaccactctgtggccttcgttcgaaacgggtatatcttcgcataaaatctagacagaagcattctcagaaaatactttgtgatgattgagtttaactcacagagctgaacattcctttggatggagcaggtttgagacacactttttgtagaatctacaagtggatatttggacctctctgaggatttcgttggaaacgcgataactgcacctaactaaacggaagcattctcagaaactgctttgtgatgattgcattcacctcacagagttgaacattcctattgatagagcagtttggaaacactcttgttgtggaatgtgcaagtggagatttggagcgctttgaggcctatggtagtaaagggaatagcttcatagaaaaactagacagatgcattctcaggaactttttggtgatgtttgtattcaactcccagagttgaactttcctttggaaagagcagctatgaaacactctttttctagaatctgcaagtggacgtttggagggctttgtggtttgtggtggaaaaggaaatatcttcacctaaatactagatagaagcattctcagaagcttctctgtgatgactgcattcaactcacggagttgaacactccttttgagagcgcagttttgaaactctctttctgtggcatctgcaaggggacatgtagacctctttgaagatttcgttggaaacggaatcatcttcacataaaaactatacagaagcagtctcagaatcttctttgtgatgtttgcattcaaatcccagagttgaactttcctttcaaagttcacgtttgaaacactctttttgcaggatctacaagtggatatttggaccactctgtgtccttcgttcgaaacgggtataacttcacacgacatctagacagaagctttctcagaaaattctttgggatgattgagtggaactcacagagctgaacattccttgcgatgtagcagtttagaaacacactttctgcagaatctgcaagtgcatatttggacctctctgaggaattcgttggaaacgggataatttcagctgactaaacagaagcattctcagaaccttcttcgtgatgtctgcattcaactcacagtgtggaacctttctttgatagttcaggtttgaaacactctttttgtagaaactgcaaggggataattgcacttctttgaggcctaccgtagtaaaggaaataacttcctatagaaagaagacagaagcattctcagaaccctcttcgtgatgtttgcattcaactcacagtgctgaacctttctttgatagttcagctttgaaacactcttcttgtagaaactgcaagtggatatttggtcctctctgaggatttcgttggaaacgggataaaccgcacagaactaaacagaagaattctcagagccctcttcgtgatgtttgcattcaactcacagtgctgaacctttctttgatagtgcagcttcgaaacactctttttgtagaaactgcaagtggatgtttggtcctctctgaggatttcgttggaaacgggataaactgcacagaactaaaacagaagcattgtcagaaacttctttgtgatgattgcattcaactcacagagttgaaggttccttttcaaacagcagtttccaatcactctttctgtggaatctgcaagtggatatttgggcctctctgaggatttcgttggaaacgggataaaacgcacagaactaaaacagaagcattctcagaaacttctctgtgatgtttgtgttcaactcccagagtttcacgttgcttttcatagagtagttctgaaacatgcttttcgtagtgtctgcaagtggacatttggagcgctttcaggcctgtggtggaaaacgaattatggtcacataaaaactggagagaagccttctcagaaacttctctgtgatgactgcattcaactcacagagttgaaccctcctatggatagagcagtgttgaaactctctttttgtggaatctgcaagtggatatgtggacctctccgaacatgtctttggaaacgggaatatcttcacataaaaactaaacagaagcagtctcagaaacttctttgtgatgtttgcattcaaatcccagacttgaaccttcctttgatagttcaggtttgaaaccctctttttgtaggatctgccagtggatatttggaccactttgtggccttcattcgaaacgggtataccttcacataaaatctagacagaagcattctcagaaaatactttgtgatgattgagtttaaatcacagagctgaccattcctttggatggagcaggtttgagacacactttttgtagaatctacaagtggatatttggacctctctgaggatttcgttggaaacgggataactgcacctaactaaacggaagcattctcagaaactgctttgtgatgattgcattcacctcacagagttgaacattcctattgatagagcagtttggaaacactcttgttgtggaatgtgcaagtggagatttggagcgctttgaggcctgtggtagtaaagggaatagcttcatagaaaaactagacagatgcattctcaggaactttttggtgatgtttgtattcaactcccagagttgaactttcctttggaaagagcagctatgaaacactctttttctagaatctgcaagtggacgtttggagggctttgtggtttgtggtggaaaaggaaatatcttcacctaaatactagatagaagcattctcagaagcttctctgtgatgactgcattcaactcacggagttgaacactccttttgagagcgcagttttgaaactctctttctgtggcatctgcaaggggacatgtagacctctttgaagatttcgttggaaacggaatcatcttcacataaaaactatacagaagcagtctcagaatcttctttgtgatgtttgcattcaaatcccagcagttgaactttcctttcaaagttcacgtttgaaacactctttttgcaggatctacaagtggatatttggaccactctgtgtccttcgttcgaaacgggtatatcttcacacgacatctagacagaagctttctcagaaaattctttgggatgattgagtggaactcacagagctgaacattccttgcgatgtagcagtttagaaacacactttctgcagaatctgcaagtgcatatttggacctctctgaggaattcgttggaaacgggataatttcagctgactaaacagaagcattctcagaaccttcttcgtgatgtctgcattcaactcacagtgtggaacctttctttgatagttcaggtttgaaacactctttttgtagaaactgcaaggggataattgcacttctttgaggcctaccgtagtaaaggaaataacttcctatagaaagaagacagaagcattctcagaaccctcttcgtgatgtttgcattcaactcacagtgctgaacctttctttgatagttcagctttgaaacactcttcttgtagaaactgcaagtggatatttggtcctctctgaggatttcgttggaaacgggataaaccgcacagaactaaacagaagaattctcagagccctcttcgtgatgtttgcattcaactcacagtgctgaacctttctttgatagtgcagctttgaaacactctttttgtagaaactgcaagtggatgtttggtcctctctgaggatttcgttggaaacgggataaaccgcacagaactaaaacagaagcattgtcagaaacttctttgtgatgattgcattcaactcacagagttgaaggttccttttcaaacagcagtttccaatcactctttctgtggaatctgcaagtggatatttgggcctctctgaggatttcgttggaaacgggataaaacgcacagaactaaaacagaagcattctcagaaacttctctgtgatgtttgtgttcaactcccagagtttcacgttgcttttcatagagtagttctgaaacatgcttttcgtagtgtctgcaagtggacatttggagcgctttcaggcctgtggtggaaaacgaattatggtcacataaaaactggagagaagccttctcagaaacttctctgtgattattgcattcaactcacagagttgaaccctcctatggatagagcagtgttgaaactctctttttgtggaatctgcaagtggatatgtggacctctccgaagatgtctttggaaacgggaatatcttcacataaaaactaaacagaagcattctcagaaacttcttggtgatgtttgcattcaaatcccagagttgaaccttcctttgatagttcaggtttgaaacactctttctgtaggatctgcaagtggctatttggaccactctgtggccttcgttcgaaacgggtatatcttcgcataaaatctagacagaagcattctcagaaaatactttgtgatgattgagtttaaatcacagagctgaccattcctttggatggagcaggtttgagacacactttttgtagaatctacaagtggatatttggacctctctgaggatttcgttggaaacgggataactgcacctaactaaacggaagcattctcagaaactgctttgtgatgattgcattcacctcacagagttgaacattcctattgatagagcagtttggaaacactcttgttgtggaatgtgcaagtggagatttggagcgctttgaggcctatggtagtaaagggaatagcttcatagaaaaactagacagatgcattctcaggaactttttggtgatgtttgtattcaactcccagagttgaactttcctttggaaagagcagctatgaaacactctttttctagaatctgcaagtggacgtttggagggctttgtggtttgtggtggaaaaggaaatatcttcacctaaatactagatagaagcatcctcagaagcttctctgtgatgactgcattcaactcacggagttgaacactccttttgagagcgcagttttgaaactctctttctgtggcatctgcaaggggacatgtagacgtctttgaagatttcgttggaaacggaatcatcttcacataaaaactacacagaagcagtctcagaatcttctttgtgatgtttgcattcaaatccccgagttgaactttcctttcaaagttcacgtttgaaacactctttttgcaggatctacaagtggatatttggaccactctgtgtccttcgttcgaaacgggtatatcttcacatgacatctagacagaagctttctcagaaaattctttgggatgattgagttgaactcacagagctgagcattccttgcgatgtagcagtttagaaacacactttctgcagaatctgcaagtgcatatttggacctctgtgaggaattcgttggaaacgggataatttcagctgactaaacagaaagcattctcagaaccttcttcgtgatgtctgcattcaactcacagtgtggaacctttctttgatagttcaggtttgaaacactctttttgtagaaactgcaaggggataattgcactctttgaggagtaccgtagtaaaggaaataacttcctctaaaaagaagacagaagcattctcagaaccctcttcgtgatgtttgcattcaactcacagtgctgaacctttctttgatagttcagctttgaaacactctttttgtagaaactgcaagtggatatttggtcctctctgaggaattcgttggaaacgggataaactgcacagaactaaacagaagcattctcagaaccttcttcgtgatgtttgcattcaactcacagtgttgaacctttctttgatagttcaggtttgaaacggtctttctgtagaaactgcaagtagatatttggacctctctgaggatttcgttggaaacgggataacccgcacagaactaaaacagaagcattcacagaaaactcttggtgacgactgagtttaactcacagagctgaacattcctttggatggagcagtttcgaaacacactatttgtagaatgtgcaagtggatatttaggcctctctgaggatttcgttggaaacgggataaaccgcacagaactaaacagaagcattctcagaaactactttgtgatgattgcattcaagtcacagagttgaacattccctttgacagagcagtttggaaactctctttgtgtagaatctgcaagtggagatatggaccgctttgaggcctatggtagtaaaggaaatagcttcatataaaagctagacagtagcattctcagaaacttctttgtgatgcttgcattcaactcacagagttgaactttcctttcgagagagaagctttgaaacactctttttccagaatctgcaagtggacatttggagggctttgaggcctgtggtggaaaaggaattatcttcccgtaaaagctagatagaagcattgtcagaaacttctttgtgatgattgcattcaactcacagagatgaaggttcctttacaaacagcagtttccaaacactctttctgtggaatctgcaagtggatatttggacctctttgaagatttcgttggaaacgggagaatcttcacagaaaagctaaacagaagcattctcagaaacttctctgtgatgtttgtgttcaactcccagagtttcacattgcttttcatagagtagttctgaaacatgcttttcgtagtgtctgcaagtggacatttggagcgctttcaggcctgtggtggaaaacgaattatggtcccataaaaactggagagaagccttctcagaaacttctctgtgatgattgcattcaactcacaggtttgaaccctcctatggatagagcattgttgaaactctctttttgtggaatctgcaagtggatatgtggacctctccgaagatgtctttggaaacgggaatatcttcacataaaaactaaacagaagcattctcagaaacttcttggtgatgtttgcattcaaatcccagagttgaaccttcctgtgatagttcaggtttgaaacactctttttgtaggatctgcaagtggatatttggaccactctgtggccttcgttcgaaacgggtacatcttcacataaaatctagacagaagcattctcagaaaatactttgtgatgattgagtttaactcacagagctgaacattcctttggatggagcaggtttgagacacactttttgtagaatctacaagtggatatttggacctctctgaggatttcgttggaaacgcgataactgcacctaactaaacggaagcattctcagaaactgctttgtgatgattgcattcacctcacagagttgaacattcctattgatagagcagtttggaaacactcttgttgtggaatgtgcaagtggagatttggagcgctttgaggcctatggtagtaaagggaatagcttcatagaaaaactagacagatgcattctcaggaactttttggtgatgtttgtattcaactcccagagttcaactttcctttggaaagagcagctatgaaacactctttttctagaatctgcaagtggacgtttggagggctttgtggtttgtggtggaaaaggaaatatcttcacctaaatactagatagaagcattctcagaagcttctctgtgatgactgcattcaactcacggagttgaacactccttttgagagcgcagttttgaaactctctttctgtggcatctgcaaggggacatgtagacctctttgaagatttcgttggaaacggaatcatcttcacataaaaactatacagaagcagtctcagaatcttctttgtgatgtttgcattcaaatcccagagttgaactttcctttcaaagttcacgtttgaaacactctttttgcaggatctacaagtggatatttggaccactctgtgtccttcgttcgaaacgggtatatcttcacacgacatctagacagaagctttctcagaaaattctttgggatgattgagtggaactcacagagctgaacattccttgcgatgtagcagtttagaaacacactttctgcagaatctgcaagtgcatatttggacctctctgaggaattcgttggaaacgggataatttcagctgactaaacagaagcattctcagaaccttcttcgtgatgtctgcattcaactcacagtgtggaacctttctttgatagttcaggtttgaaacactctttttgtagaaactgcaaggggataattgcacttctttgaggcctaccgtagtaaaggaaataacttcctatagaaagaagacagaagcattctcagaaccctcttcgtgatgtttgcattcaactcacagtgctgaacctttctttgatagttcagctttgaaacactcttcttgtagaaactgcaagtggatatttggtcctctctgaggatttcgttggaaacgggataaaccgcacagaactaaacagaagaattctcagagccctcttcgtgatgtttgcattcaactcacagtgctgaacctttctttgatagtgcagctttgaaacactctttttgtagaaactgcaagtggatgtttggtcctctctgaggatttcgttggaaacgggataaaccgcacagaactaaaacagaagcattgtcagaaacttctttgtgatgattgcattcaactcacagagttgaaggttccttttcaaacagcagtttccaatcactctttctgtggaatctgcaagtggatatttgggcctctctgaggatttcgttggaaacgggataaaacgcacagaactaaaacagaagcattctcagaaacttctctgtgatgtttgtgttcaactcccagagtttcacgttgcttttcatagagtagttctgaaacatgcttttcgtagtgtctgcaagtggacatttggagcgctttcaggcctgtggtggaaaacgaattatggtcacataaaaactggagagaagccttctcagaaacttctctgtgatgattgcattcaactcacagagttgaaccctcctatggatagagcagtgttgaaactctctttttgtggaatctgcaagtggatatgtggacctctccgaagatgtctttggaaacgggaatatcttcacataaaaactaaacagaagcattctcagaaacttcttggtgatgtttgcattcaaatcccagagttgaaccttcctttgatagttcaggtttgaaacactctttctgtaggatctgcaagtggctatttggaccactctgtggccttcgttcgaaacgggtatatcttcgcataaaatctagacagaagcattctcagaaaatactttgtgatgattgagtttaaatcacagagctgaccattcctttggatggagcaggtttgagacacactttttgtagaatctacaagtggatatttggacctctctgaggatttcgttggaaacgggataactgcacctaactaaacggaagcattctcagaaactgctttgtgatgattgcattcacctcacagagttgaacattcctattgatagagcagtttggaaacactcttgttgtggaatgtgcaagtggagatttggagcgctttgaggcctatggtagtaaagggaatagcttcatagaaaaactagacagatgcattctcaggaactttttggtgatgtttgtattcaactcccagagttgaactttcctttggaaagagcagctatgaaacactctttttctagaatctgcaagtggacgtttggagggctttgtggtttgtggtggaaaaggaaatatcttcacctaaatactagatagaagcattctcagaagcttctctgtgatgactgcattcaactcacggagttgaacactccttttgagagcgcagttttgaaactctctttctgtggcatctgcaaggggacatgtagacctctttgaagatttcgttggaaacggaatcatcttcacatcaaaactatacagaagcagtctcagaatcttctttgtgatgtttgcattcaaatcccagagttgaactttcctttccaagttcacgtttgaaacactctttttgcaggatctacaagtggatatttggaccactctgtgtccttcgttcgaaacgggtatatcttcacatgacatctagacagaagctttctcagaaaattctttgggatgattgagttgagcaaacagagctgaacactccttgtgatgtagcagtttagaaacacactttctgcagaatctgcaagtgcatatgtggacctctctgaggaaatcgttggaaacgggataatttcagctgactaaacagaagcattctcagaaccttcttcgtgatgtctgcattcaactcacagtgtggaacctttctttgatagttcaggtttgaaacactctttttgtagaaactgcaaggggatcattgcacttctttgaggcctaccgtagtaaaggagataacttcctataaaaagaagacagaagcattctcagaaccctcttcgtgatgtttgcattcaactcacggtgctgaacctttctttgatagttcagctttgaaacactctttttgtagaaactgcaattggatatttggtcctctctgaggatttcgttggaaactggacaaaccgcacagaactaaacagaagcattctcagaaccttcttcgtgatgtttgcattcaactcacagtgttgaacctttctttgatagttcaggtttgaaacggtctttctgtagaaactgcaagtagatatttggacctctctgaggatttcgttggaaacgggataaaccgcacacaactaaaacagaagcattcacagaaaactcttggtgacgactgagtttaactcacagagctgaacattcgtttggatggagcagtttcgaaacacactatttgtagaatgtgcaagtggatatgtgggcctctctgaggatttcgttggaaacgggataaaccgcacagaactaaacagaagcattctcagaaactactttgtgatgattgcattcaagtcacagagttgaacattccctttgacagagcagtttggaaactctctttgtgtagaatctgcaagtggagatatggaccgctttcaggcctatggtagtaaaggaaatagcttcatataaaagctagacagtagcattctcagaaacttctttgtgatgcttgcattcaactcacagagttgaactttcctttcgagagagaagctttgaaacactctttttccagaatctgcaagtggacatttggagggctttgaggcctgtggtggaaaaggaattatcttcccgtaaaagctagatagaagcattgtcagaaacttctttgtgatgattgcattcaagtcacagagttgaaggttccttttcaaagagcagtttcaatcactctttctgtggaatctgcaagtggatatttggacctctttgaagatttcgttggaaacgggagaatcttcacagaaaagctaaacagaagcattctcagaaacttctctgtgatgtttgtgttcaactcccagagtttcacgttgcttttcatagagtagttctgaaacatgcttttcgtagtgtctgcaagtggacatttggagcgctttcaggcctgtggtggaaaacgaattatggtcacataaaaactggagagaagccttctcagaaacttctctgtgatgattgcattcaactcacagagttgaaccctcctatggatagagcagtgttgaaactctctttttgtggaatctgcaagtggatatgtggacctctccgaagatgtctttggaaacgggaatatcttcacataaaaactaaacagaagcattctcagaaacttcttggtgatgtttgcattcaaatcccagagttgaaccttcctttgatagttcaggtttgaaacactctttctgtaggatctgcaagtggctatttggaccactctgtggccttcgttcgaaacgggtatatcttcgcataaaatctagacagaagcattctcagaaaatactttgtgatgattgagtttaaatcacagagctgaccattcctttggatggagcaggtttgagacacactttttgtagaatctacaagtggatatttggacctctctgaggatttcgttggaaacgggataactgcacctaactaaacggaagcattctcagaaactgctttgtgatgattgcattcacctcacagagttgaacattcctattgatagagcagtttggaaacactcttgttgtggaatgtgcaagtggagatttggagcgctttgaggcctatggtagtaaagggaatagcttcatagaaaaactagacagatgcattctcaggaactttttggtgatgtttgtattcaactcccagagttgaactttcctttggaaagagcagctatgaaacactctttttctagaatctgcaagtggacgtttggagggctttgtggtttgtggtggaaaaggaaatatcttcacctaaatactagatagaagcattctcagaagcttctctgtgatgactgcattcaactcacggagttgaacactccttttgagagcgcagttttgaaactctctttctgtggcatctgcaaggggacatgtagacctctttgaagatttcgttggaaacggaatcatcttcacataaaaactatacagaagcagtctcagaatcttctttgtggtgtttgcattcaaatcccagagttgaactttcctttcaaagttcacgtttgaaacactctttttgcaggatctacaagtggatatttggaccactctgtgtccttcgttcgaaacgggtatatcttcacatgacatctagacagaagctttctcagaaaattctttgggatgattgagttgaactcacagagctgaacattccttgcgatgtagcagttcagaaacacactttctgcagaatctgcaagtgcatatttggacctctctgaggaattcgttggaaacgggataatttcagctgactaaacagaagcattctcagaaccttcttcgtgatgtctgcattcaactcacagtgtggaacctttctttgatagttcaggtttgaaacactctttttgtagaaactgcaaggggataattgcacttctttgaggcctaccgtagtaaaggaaataacttcctataaaaagaagacagaagcattcgcagaaccctcttcgtgatgtttgcattcaactcacggtgctgaacctttctttgatagttcagctttgaaacactctttttgtagaaactgcaagtggatatttggtcctctctgaggatttcgttggaaacgggataaaccgcacagaactaaacagaagaattctcaaatccttcttcgtgatgtttgcattcaactctcagtgctgaacctttctttgatagatcagctttgaaacactctttttgtagaaactgcaagtggatatttggtgctctctgaggatttcgttggaaacgggataaaccgcacagaactaaatagaagcattcacagaaaactcttggtgacgactgagtttaactcacagagctgaacattcctttggagggagcagtttcgaaacacactatttgtagaatgtgcaagtggatatttgggcctctctgaggatttcgttggaaacgggataaacggcacagaaataaacagaagcattctcagaaactactttgtgatgattgcattcaagtcacagagttgaacattccctttgacagagcagtttggaaactctctttgtgtagaatctgcaagtggagatatggaccgctttgaggcctatggtagtaaaggaaatagcttcatataaaagctagacagtagcattttcagaaacttctttgtgatacttgcattcaactcacagagttgaactttcctttcgagagagaagctttgaaacactctttttccagaatctgcaagtggacatttggagggctttgaggcctgtggtggaaaaggaattatcttcctgtaaaagctagatagaagcattgtcagaaacttctttgtgatgattgcattcaactcacagagttgaaggttccttttcaaacagcagtttccaatcactctttctgtggaatctgcaagtggatatttggacctctttgaagatttcgttggaaacgggagaatcttcacagaaaagttaaacagaagcattctcagaaacttctctgtgatgtttgtgttcaactcccagagtttcacattgcttttcatagagtagttctgaaacatgcttttcgtagtgtctgcaagtggacatttggagcgctttcaggcctgtggtggaaaacgaattatggtcacataaaaactggagagaagccttctcagaaacttctctgtgatgattgcattcaactcacagagttgaaccctcctatggatagagcagtgttgaaactctctttttgtggaatctgcaagtggatatgtggacctctccgaagatgtctttggaaacgggaatatcttcacataaaagctaaacagaagcattctcagaaacttcttggtgatgtttgcattcaaatcccagagttgaaccttcctttgatagttcaggtttgaaacactctttttgtaggatctgcaagtggatatttggaccactctgtggccttcgttcgaaacgggtacatcttcacataaaatctagacagaagcattctcagaaaatactttgtgatgattgagttgaactcacagagctgaacattcctttggatggagcaggtttgagacacactttttgtagaatctacaagtggatatttggacctctctgaggatttcgttggaaacgggataactgcacctaactaaacggaagcattctcagaaactgctttgtgatgattgcattcacctcacagagttgaacattcctattgatagagcagtttggaaacactcttgttgtggaatgtgcaagtggagatttggagcgctttgaggcctatggtagtaaagggaatagcttcatagaaaaaatagacagatgcattctcaggaactttttggtgatgattgtattcaactcccagagttgaactttcctttggaaagagcagctatgaaacactctttttctagaatctgcacgtggacgtttggaggtctttgttgtttgtggtggaaaacgaaatatcttcacctaaatactagatagaagcattctcagaagcttctctgtgatgactgcattcaactcacggagttgaacactccttttgagagcgcagttttgaaactctctttctgtggcatctgcaaggggacatgtagacctctttgaagatttcgttggaaacggaatcatcttcacataaaaactatacagaagcagtctcagaatcttctttgtgatgtttgcattcaaatcccagagttgaactttcctttcaaagttcacgtttgaaacactctttttgcaggatctacaagtggatatttggaccactctgtgtccttcgttcgaaacgggtatatcttcacatgacatctagacagaagctttctcagaaaattcttcgggatgattgagtggaactcacagagctgaacattccttgcgatgtagcagtttagaaacacactttctgcagaatctgcaagtgcatatttggacctctctgaggaattcgttggaaacgggataatttcagctgactaaacagaagcattctcagaaccttcttcgtgatgtctgcattcaactcacagtgtggaacctttctttgatagttcaggtttgaaacactctttttgtagaaactgcaaggggataattgcacttctttgaggcctaccgtagtaaaggaaataacttcctatagaaagaagacagaagcattctcagaaccctcttcgtgatgtttgcattcaactcacagtgctgaacctttctttgatagttcagctttgaaacactcttcttgtagaaactgcaagtggatatttggtcctctctgaggatttcgttggaaacgggataaaccgcacagaactaaacagaagaattctcagagccctcttcgtgatgtttgcattcaactcacagtgctgaacctttctttgatagtgcagctttgaaacactctttttgtagaaactgcaagtggatatttggtcctctctgaggatttcgttggaaacgggataaaccgcacagaactaaaacagaagcattcacagaaaactcttggtgacgactgagtttaactcacagagctgaacattcctttggatggagcagtttcgaaacacactatttgtagaatctgcaagtggatatttgggcctctctgaggatttcgttggaaacgggataaaacgcacagaactaaaacagaagcattctcagaaactactttgtgatgattgcattcaagtcacagagttgaacattccctttgacagagcagtttggaaactctctttgtgtagaatctgcaagtggagatatggaccgctttgaggcctatggtagtaaaggaaatagcttcatataaaagctagacagtagcattctcagaaacttctttgtgatgcttgcattcaactcacagagttgaactttcctttcgagagagaagctttgaaacactctttttccagaatgtgcaagtggacatttggggagctttgaggcctgtggtggaaaaggaattatcttcccgtaaaagctagatagaagcattgtcagaaacttctttgtgatgattgcattcaactcacagagttgaaggttccttttcaaacagcagtttccaatcactctttctgtggaacctgcaagtggatatttcgacctctttgaagatttcgttggaaacgggagaatcttcacagaaaagctaaacagaagcattctcagaaacttctctgtgatgtttgtgttcaactcccagagtttcacgttgcttttcatagagtagttctgaaacatgcttttcgtagtgtctgcaagtggacatttggagcgctttcaggcctgtggtggaaaacgaattatggtcacataaaaactggagagaagccttctcagaaacttctctgtgatgattgcattcaactcacagagttgaaccctcctatggatagagcagtgttgaaactctctttttgtggaatctgcaagtggatatgtggacctctccgaagatgtctttggaaacgggaatatcttcacataaaaactaaacagaagcattctcagaaacttcttggtgatgtttgcattcaaatcccagagttgaaccttcctttgatagttcaggtttgaaacactctttctgtaggatctgcaagtggctatttggaccactctgtggccttcgttcgaaacgggtatatcttcgcataaaatctagacagaagcattctcagaaaatactttgtgatgattgagtttaaatcacagagctgaccattcctttggatggagcaggtttgagacacactttttgtagaatctacaagtggatatttggacctctctgaggatttcgttggaaacgggataactgcacctaactaaacggaagcattctcagaaactgctttgtgatgattgcattcacctcacagagttgaacattcctattgatagagcagtttggaaacactcttgttgtggaatgtgcaagtggagatttggagcgctttgaggcctgtggtagtaaagggaatagcttcatagaaaaactagacagaatgcattctcagggaactttttggtgatgtttgtattcaactcccagagttgaactttcctttggaaagagcagctatgaaacactctttttctagaatctgcaagtggacgtttggagggctttgtggtttgtggtggaaaaggaaatatcttcacctaaatactagatagaagcattctcagaagcttctctgtgatgactgcattcaactcacggagttgaacactccttttgagagcgcacttttgaaactctctttctgtggcatctgcaaggggacatgtagacctctttgaagatttcgttggaaacggaatcatcttcacataaaaactatacagaagcagtctcagaatcttctttgtgatgtttgcattcaaatcccagagttgaactttcctttcaaagttcacgtttgaaacactctttttgcaggatctacaagtggatatttggaccactctgtgtccttcgttcgaaacgggtatatcttcacaggacatctagacagaagctttctcagaaaattctttgggatgattgagtggaactcacagagctgaacattccttgcgatgtagcagtttagaaacacactttctgcagaatctgcaagtgcatatttggacctctctgaggaattcgttggaaacgggataatttcagctgactaaacagaagcattctcagaaccttcttcgtgatgtctgcattcaactcacagtgtggaacctttctttgatagttcaggtttgaaacactctttttgtagaaactgcaaggggataattgcacttctttgaggcctaccgtagtaaaggaaataacttcctatagaaagaagacagaagcattctcagaaccctcttcgtgatgtttgcattcaactcacagtgctgaacctttctttgatagttcagctttgaaacactcttcttgtagaaactgcaagtggatatttggtcctctctgaggatttcgttggaaacgggataaaccgcacagaactaaacagaagaattctcagagccctcttcgtgatgtttgcattcaactcacagtgctgaacctttctttgatagtgcagctttgaaacactctttttgtagaaactgcaagtggatgtttggtcctctctgaggatttcgttggaaacgggataaaccgcacagaactaaaacagaagcattgtcagaaacttctttgtgatgattgcattcaactcacagagttgaaggttccttttcaaacagcagtttccaatcactctttctgtggaatctgcaagtggatatttgggcctctctgaggatttcgttggaaacgggataaaacgcacagaactaaaacagaagcattctcagaaacttctctgtgatgtttgtgttcaactcccagagtttcacgttgcttttcatagagtagttctgaaacatgcttttcgtagtgtctgcaagtggacatttggagcgctttcaggcctgtggtggaaaacgaattatggtcacataaaaactggagagaagccttctcagaaacttctctgtgatgattgcattcaactcacagagttgaaccctcctatggatagagcagtgttgaaactctctttttgtggaatctgcaagtggatatgtggacctctccgaagatgtctttggaaacgggaatatcttcacataaaaactaaacagaagcattctcagaaacttcttggtgatgtttgcattcaaatcccagagttgaaccttcctttgatagttcaggtttgaaacactctttctgtaggatctgcaagtggctatttggaccactctgtggccttcgttcgaaacgggtatatcttcgcataaaatctagacagaagcattctcagaaaatactttgtgatgattgagtttaaatcacagagctgaacagtcctttggatggagcaggtttgagacacactttttgtagaatctacaagtggatatttcgacctctctgaggatttcgttggaaacgggataactgcacctaactaaacggaagcattctcagaaactgctttgtgatgattgcattcacctcacagagttgaacattactattgatagagcagtttggaaacactcttgttgtggaatgtgcaagtggagatttggagcgctttgaggcctatggtagtaaagggaatagcttcatagagaaactagacagatgcattctcaggaactttttggtgatgtttgtattcaactcccagagttgaactttcctttggaaagagcagctatgaaacactctttttctagaatctgcaagtggacgtttggagggctttgtggtttgtggtggaaaaggaaatatcttcacctaaatactagatagaagcattctcagaagcttctctgtgatgactgcattcaactcacggagttgaacactccttttgagagcgcagttttgaaactctctttctgtggcatctgcaaggggacatgtagacctctttgaagatttcgttggaaacggaatcatcttcacataaaaactatacagaagcagtctcagaatcttctttgtgatgtttgcattcaaatcccagagttgaactttcctttcaaagttcacgtttgaaacactctttttgcaggatctacaagtggatatttggaccactctgtgtccttcgttcgaaacgggtatatcttcacatgacatctagacagaagctttctcagaaaattctttgggatgattgagtggaactcacagagctgaacattccttgcgatgtagcagtttagaaacacactttctgcagaatctgcaagtgcatatttggacctctctgaggaattcgttggaaacgggataatttcagctgactaaacagaagcattctcagacacccttcttcgtgatgtctgcattcaactcacagtgtggaacctttctttgatagttcaggtttgaaacactctttttgtagaaactgcaaggggataattgcacttctttgaggcctaccgtagtaaaggaaataacttcctatagaaagaagacagaagcattctcagaaccctcttcgtgatgtttgcattcaactcacagtgctgaacctttctttgatagttcagctttgaaacactcttcttgtagaaactgcaagtggatatttggtcctctctgaggatttcgttggaaacgggataaaccgcacagaactaaacagaagaattctcagagccctcttcgtgatgtttgcattcaactcacagtgctgaacctttctttgatagtgcagctttgaaacactctttttgtagaaactgcaagtggatgtttggtcctctctgaggatttcgttggaaacgggataaaccgcacagaactaaaacagaagcattgtcaggaaacttctttgtgatgattgcattcaactcacagagttgaaggttccttttcaaacagcagtttccaatcactctttctgtggaatctgcaagtggatatttgggcctctctgaggatttcgttggaaacgggataaaacgcacagaactaaaacagaagcattctcagaaacttctctgtgatgtttgtgttcaactcccagagtttcacattgcttttcatagagtagttctgaaacatgcttttcgtagggtctgcaagtggacatttggagcgctttcaggcctgtggtggaaaacgaattatggtcacataaaaactggagagaagccttctcagaaacttctctgtgatgattgcattcaactcacagagttgaaccctcctatggatagagcagtgttgaaactctctttttgtggaatctgcaagtggatatgtggacctctccgaagatgtctttggaaacgggaatatcttcacataaaaactaaacagaagcattctcagaaacttcttggtgatgtttgcattcaaatcccagagttgaaccttcctttgatagttcaggtttgaaacactctttttgtaggatctgcaagtggctatttggaccactctgtggccttcgttcgaaacgggtatatcttcgcataaaatctagacagaagcattctcagaaaatactttgtgatgattgagtttaaatcacagagctgaccattcctttggatggagcaggtttgagacacactttttgtagaatctacaagtggatatttggacctctctgaggatttcgttggaaacgggataactgcacctaactaaacggaagcattctcagaaactgctttgtgatgattgcattcacctcacagagttgaacattcctattgatagagcagtttgggaacactcttgttgtggaatgtgcaagtggagatttggagcgctttgaggcctatggtagtaaagggaatagcttcatagaaaaaattgacagatgcattctcaggaactttttggtgatgtttgtattcaactcccagagttgaactttcctttggaaagagcagctatgaaacactctttttctagaatctgcaagtggacgtttggagggctttgtggtttgtggtggaaaaggaaatatcttcacctaaatactagatagaagcattctcagaagcttctctgtgatgactgcattcaactcacggagttgaacactccttttgagagcgcagttttgaaactctctttctgtggcatctgcaaggggacatgtagacctctttgaagatttcgttggaaacggaatcatcttcgcataaaaactatacagaagcagtctcagaatcttctttgtgatgtttgcattcaaatcccagagttgaactttcctttcaaagttcacgtttgaaacactctttttgcaggatctacaagtggatatttggaccactctgtgtccttcgttcgaaacgggtatatcttcacatggcatctagacagaagctttctcagaaaattctttgggatgattgagtggaactcacagagctgaacattccttgcgatgtagcagtttagaaacacactttctgcagaatctgcaagtgcatatttggacctctccgaggaattcgttggaaacgggataatttcagctgactaaacagaagcattctcagaaccttcttcgtgatgtctgcattcaactcacagtgtggaacctttctttgatagttcaggtttgaaacactctttttgtagaaactgcaaggggataattgcacttctttgaggcctaccgtagtaaaggaaataacttcctatagaaagaagacagaagcattctcagaaccctcttcgtgatgtttgcattcaacacacagtgctgaacctttctttgatagttcagctttgaaacactctttttgtagaaactgcaactggatatttggtcctctctgaggatttcgttggaaacgggataaaccgcacagaactaaacagaagcattctcagaaccttcttcgtgatgtttgcattcaactcacagtgttgaacctttctttgatagttcaggtttgaaacggtctttctgtagaaactgcaagtagatatttggacctctctgaggatttcgttggaaacgggataacccgcacagaactaaaacagaagcattcacagaaaactcttggtgacgactgagtttaactcacagagctgaacattcctttggatggagcagtttcgaaacacactatttgtagaatgtgcaagtggatatttgggcctctctgaggatttcgttggaaacgggataaaccgcacagaactaaacagaagcattctcagaaactactttgtggtgattgcattcaagtcacagagttgaacattccctttgacagagcagtttggaaactctctttgtgtagaatctgcaagtggagatatggaccgctttgaggcctatggtagtaaaggaaatagcttcatataaaagctagacagtagcattctcagaaacttctttgtgatgcttgcattcaactcacagagttgaactttcctttcgagagagaagctttgaaacactctttttccagaatctgcaagtggacatttggagggctttgaggcctgtggtggaaaaggaattatcttcccgtaaaagctagatagaagcattgtcagaaacttctttgtgatgattgcattcaagtcacagagttgaagattccttttcaaagagcagtttccaatcactctttctgtggaatctgcaagtggatatttggacctctttgaagatttcgttggaaacgggagaatcttcacagaaaatctaaacagaagcattctcagaaacttctctgtgatgtttgtgttcaactcccagagtttcacattgcttctcatagagtagttctgaaacatgcttttcgtagtgtctgcaagtggacatttggagcgctttcaggcctgtggtggaaaacgaattatggtcacataaaaactggagagaagccttctcagaaacttctctgtgatgattgcattcgattcacagagttgaaccctcctatggatagagcagtgttgaaactctctttttgtggaatctgcaagcggatatgtggacctctccgaagatgtctttggaaacgggaatatcttcacataaaaactaaacagaagcattctcagaaacttcttggtgatgtttgcattcaaatcccagagttgaaacttcctttgagagttcaggtttgaaacactctttttgtaggatctgcaagtggatatttggaccactctgtggccttcgttcgaaacgggtacatcttcgcataaaatctagacagaagcattctcagaaaatactttgtgatgattgagttgaactcacagagctgaacattcctttggatggagcaggtttgagacacactttttgtagaatctacaagtggatatttggacctctctgaggatttcgttggaaacgggataactgcacctaactaaacggaagcattctcagaaactgctttgtgatgattgcattcacctcacagggttgaacattcctattgatagagcagtttggaaacactcttgttgtggaatgtgcaagtggagatttggagcgctttgaggcttatggtagtaaagggaatagcttcatagaaaaactagacagatgcattctcaggaactttttggtgatgtttgtattcaactcccagagttgaactttcctttggaaagagcagctatgaaacactctttttctagaatctgcaagtggacgtttggagggctttgtggtttgtggtggaaaggaaatatcttcacctaaatactagatagaagcattctcagaagcttctctgtgatgactgcattcaactcatggagttgaacactccttttgagagcgcagttttgaaactctctttctgtggcatccgcaaggggacatgtggacctctttgaagatttcgttggaaacggaatcatcttcacatcaaaactatacagaagcagtctcagaatcttctttgtgatgtttgcattcaaatcccagagttgaactttcctttcaaagttcacgtttgaaacactctttttgcaggatctacaagtggatatttggaccactctgtgtccttcgttcgaaacgggtatatcttcacatgacatctacacagaagctttctcagaaaattctttgggatgattgagtggaactcacagagctgaacattccttgcgatgtagcagtttagaaacacactttctgcagaatctgcaagtgcatatttggacctctctgaggaattctttggaaacgggataattacagctgactaaacagaagcattctcagaaccttcttcgtgatgtctgcattcaactcacagtgtggaacctttctttgatagttcaggtttgaaacactctttttgtagaaactgcaaggggataattgcacttctttgaggcctaccgtagtaaaggaaataacttcctatagaaagaagacagaagcattctcagaaccctcttcgtgatgtttgcattcaactcacagtgctgaacctttctttgatagttcagctttgaaacactcttcttgtagaaactgcaagtggatatttggtcctctctgaggatttcgttggaaacgggataaaccgcacagaactaaacagaagaattctcagagccctcttcgtgatgtttgcattcaactcacagtgctgaacctttctttgatagtgcagctttgaaacactctttttgtagaaactgcaagtggatgtttggtcctctctgaggatttcgttggaaacgggataaaccgcacagaactaaaacagaagcattgtcagaaacttctttgtgatgattgcattcaactcacagagttgaaggttccttttcaaacagcagtttccaatcactctttctgtggaatctgcaagtggatatttgggcctctctgaggatttcgttggaaacgggataaaacgcacagaactaaaacagaagcattctcagaaacttctctgtgatgtttgtgttcaactcccagagtttcacgttgcttttcatagagtagttctgaaacatgcttttcgtagtgtctgcaagtggacatttggagcgctttcaggcctgtggtggaaaacgaattatggtcacataaaaactggagagaagccttctcagaaacttctctgtgatgattgcattcaactcacagagttgaaccctcctatggatagagcagtgttgaaactctctttttgtggaatctgcaagtggatatgtggacctctccgaagatgtctttggaaacgggaatatcttcacataaaaactaaacagaagcattctcagaaacttcttggtgatgtttgcattcaaatcccagagttgaaccttcctttgatagttcaggtttgaaacactctttctgtaggatctgcaagtggctatttggaccactctgtggccttcgttcgaaacgggtatatcttcgcataaaatctagacagaagcattctcagaaaatactttgtgatgattgagtttaaatcacagagctgaccattcctttggatggagcaggtttgagacacactttttgtagaatctacaagtggatatttggacctctctgaggatttcgttggaaacgggataactgcacctaactaaacggaagcattctcagaaactgctttgtgatgattgcattcacctcacagagttgaacattcctattgatagagcagtttggaaacactcttgttgtggaatgtgcaagtggagatttggagcgctttgaggcctgtggtagtaaagggaatagcttcatagaaaaactagacagatgcattctcaggaactttttggtgatgtttgtattcaactcccagagttgaactttcctttggaaagagcagctatgaaacactctttttctagaatctgcaagtggacgtttggagggctttgtggtttgtggtggaaaaggaaatatcttcacctaaatactagatagaagcattctcagaagcttctctgtgatgactgcattcaactcacggagttgaacactccttttgagagcgcagttttgaaactctctttctgtggcatccgcaaggggacatgtggacctctttgaagatttcgttggaaacggaatcatcttcacataaaaactgtacagaagcagtctcagaatcttctttgtgatgtttgcattcaaatcccagagttgaactttcctttcaaagttcacgtttgaaacactctttttgcaggatctacaagtggatatttggaccactctgtgtccttctttcgaaacgggtatatcttcacacgacatctagacagaagctttctcagaaaattctttgggatgattgagtggaactcacagagctgaacattccttgcgatgtagcagtttagaaacacactttctgcagaatctgcaagtgcatatttggacctctctgaggaattcgttggaaacgggataatttcagctgactaaacagaagcattctcagaaccttcttcgtgatgtctgcattcaactcacagtgtggaacctttctttgatagttcaggtttgaaacactctttttgtagaaactgcaaggggataattgcacttctttgaggcctaccgtagtaaaggaaataacttcctatagaaagaagacagaagcattctcagaaccctcttcgtgatgtttgcattcaactcacagtgctgaacctttctttgatagttcagctttgaaacactcttcttgtagaaactgcaagtggatatttggtcctctctgaggatttcgttggaaacgggataaaccgcacagaactaaacagaagaattctcagagccctcttcgtgatgtttgcattcaactcacagtgctgaacctttctttgatagtgcagctttgaaacactctttttgtagaaactgcaagtggatgtttggtcctctctgaggatttcgttggaaacgggataaaccgcacagaactaaaacagaagcattgtcagaaacttctttgtgatgattgcattcaactcacagagttgaaggttccttttcaaacagcagtttccaatcactctttctgtggaatctgcaagtggatatttgggcctctctgaggatttcgttggaaacgggataaaacgcacagaactaaaacagaagcattctcagaaaacttctctgtgatgtttgtgttcaactcccagagtttcacgttgcttttcatagagtagttctgaaacatgcttttcgtagtgtctgcaagtggacatttggagcgctttcaggcctgtggtggaaaacgaattatggtcacataaaaactggagagaagccttctcagaaacttctctgtgatgattgcattcaactcacagagttgaaccctcctatggatagagcagtgttgaaactctctttttgtggaatctgcaagtggatatgtggacctctccgaagatgtctttggaaacgggaatatcttcacataaaaactaaacagaagcattctcagaaacttcttggtgatgtttgcattcaaatcccagagttgaaccttcctttgatagttcaggtttgaaacactctttctgtaggatctgcaagtggctatttggaccactctgtggccttcgttcgaaacgggtatatcttcgcataaaatctagacagaagcattctcagaaaatactttgtgatgattgagtttaaatcacagagctgaccattcctttggatggagcaggtttgagacacactttttgtagaatctacaagtggatatttggacctctctgaggatttcgttggaaacgggataactgcacctaactaaacggaagcattctcagaaactgctttgtgatgattgcattcacctcacagagttgaacattcctattgatagagcagtttggaaacactcttgttgtggaatgtgcaagtggagatttggagcgctttgaggcctatggtagtaaagggaatagcttcatagaaaaactagacagatgcattctcaggaaccttttggtgatgtttgtattcaactcccagagttgaactttcctttggaaagagcagctatgaaacactctttttctagaatctgcaagtggacgtttggagggctttgtggtttgtggtggaaaaggaaatatcttcacctaaatactagatagaagcattctcagaagcttctctgtgatgactgcattcaactcacggagttgaacactccttttgagagcgcagttttgaaactctctttctgtggcatctgcaaggggacatgtagacctctttgaagatttcgttggaaacggaatcatcttcacataaaaactatacagaagcagtctcagaatcttctttgtgatgtttgcattcaaatcccagagttgaactttcctttcaaagttcacgtttgaaacactctttttgcaggatctacaagtggatatttggaccactctgtgtccttcgttcgaaacgggtatatcttcacacgacatctagacagaagctttctcagaaaattctttgggatgattgagtggaactcacagagctgaacattccttgcgatgtagcagtttagaaacacactttctgcagaatctgcaagtgcatatttggacctctctgaggaattcgttggaaacgggataatttcagctgactaaacagaagcattctcagaaccttcttcgtgatgtctgcattcaactcacagtgtggaacctttctttgatagttcaggtttgaaacactctttttgtagaaactgcaaggggataattgcacttctttgaggcctaccgtagtaaaggaaataacttcctatagaaagaagacagaagcattctcagaaccctcttcgtgatgtttgcattcaactcacagtgctgaacctttctttgatagttcagctttgaaacactcttcttgtagaaactgcaagtggatatttggtcctctctgaggatttcgttggaaacgggataaaccgcacagaactaaacagaagaattctcagagccctcttcgtgatgtttgcattcaactcacagtgctgaacctttctttgatagtgcagctttgaaacactctttttgtagaaactgcaagtggatgtttggtcctctctgaggatttcgttggaaacgggataaaccgcacagaactaaaacagaagcattgtcagaaacttctttgtgatgattgcattcaactcacagagttgaaggttccttttcaaacagcagtttccaatcactctttctgtggaatctgcaagtggatatttgggcctctctgaggatttcgttggaaacgggataaaacgcacagaactaaaacagaagcattctcagaaacttctctgtgatgtttgtgttcaactcccagagtttcacgttgcttttcatagagtagttctgaaacatgcttttcgtagtgtctgcaagtggacatttggagcgctttcaggcctgtggtggaaaacgaattatggtcacataaaaactggagagaagccttctcagaaacttctctgtgatgattgcattcaactcacagagttgaaccctcctatggatagagcagtgttgaaactctctttttgtggaatctgcaagtggatatgtggacctctccgaagatgtctttggaaacgggaatatcttcacataaaaactaaacagaagcattctcagaaacttcttggtgatgtttgcattcaaatcccagagttgaaccttcctttgatagttcaggtttgaaacactgtttctgtaggatctgcaagtggctatttggaccactctgtggccttcgttcgaaacgggtatatcttcgcataaaatctagacagaagcattctcagaaaatactttgtgatgattgagtttaaatcacagagctgaccattcctttggatggagcaggtttgagacacactttttgtagaatctacaagtggatatttggacctctctgaggatttcgttggaaacgggataactgcacctaactaaacggaagcattctcagaaactgctttgtgatgattgcattcacctcacagagttgaacattcgtattgatagagcagtttggaaacactcttcttgtggaatgtgcaagtggagatttggagcgctttggggcctatggtagtaaagggaatagcttcatagaaaaactagacagatgcattctcaggaactttttggtgatgtttgtattcaactcccagagttgaactttcctttggaaagagcagctatgaaacactctttttctagaatctgcaagtggacgtttggagggctttgtggtttgtggtggaaaaggaaatatcttcacctaaatactagatagaagcattctcagaagcttctctgtgatgactgcattcaactcacggagttgaacactccttttgagagcgcagttttgaaactctctttctgtggcatctgcaaggggacatgtagacctctttgaagatttcgttggaaacggaatcatcttcacataaaaactatacagaagcagtctcagaatcttctttgtgatgtttgcattcaaatcccagagttgaactttcctttcaaagttcacgtttgaaacactctttttgcaggatctacaagtggatatttggaccactctgtgtccttcgttcgaaacgggtatatcttcacacgacatctagacagaagctttctcagcaaaattctttgggatgattgagtggaactcacagagctgaacattccttgcgatggagcagtttagaaacacactttctgcagaatctgcaagtgcatatttggacctctctgaggaattcgttggaaacgggataatttcagctgactaaacagaagcattctcagaaccttcttcgtgatgtctgcattcaactcacagtgtggaacctttctttgatagttcaggtttgaaacactctttttgtagagactgcaaggggatcattgcacttctttgaggcctaccgtagtaaaggagataacttcctataaaaagaagacagaagcattctcagaaccctcttcgtgatgtttgcattcaactcacggtgctgaacctttctttgatagttcagctttgaaacactctttttgtagaaactgcaagtggatatttggtcctctctgaggatttcgttggaaacggtataaaccgcacagaactaaacagaagcattgtcagaaacttctttgtgatgattgcattcaactcacagagttgaaggttccttttcaaacagcagtttccaatcactctttctgtggaatctgcaagtggatatttgggcctctctgaggatttcgttggaaacgggataaaacgcacagaactaaaacagaagcattctcagaaacttctctgtgatgtttgtgttcaactccccagagtttcacgttgcttttcatagagtagttctgaaacatgcttttcgtagtgtctgcaagtggacatttggagcgctttcaggcctgtggtggaaaacgaattatggtcacataaaaactggagagaagccttctcagaaacttctctgtgatgattgcattcaactcacagagttgaaccctcctatggatagagcagtgttgaaactctctttttgtggaatctgcaagtggatatgtggacctctccgaagatgtctttggaaacgggaatatcttcacataaaaactaaacagaagcattctcagaaacttcttggtgatgtttgcattcaaatcccagagttgaaccttcctttgatagttcaggtttgaaacactctttttgtaggatctgcaagtggctatttggaccactctgtggccttcgttcgaaacgggtatatcttcgcataaaatctagacagaagcattctcagaaaatactttgtgatgattgagtttaaatcacagagctgaacattcctttggatggagcaggtttgagacacactttttgtagaatctacaagtggatatttggacctctctgaggatttcgttggaaacgggataactgcacctaactaaacggaagcattctcagaaactgctttgtgatgattgtattcacctcacagagttgaacattcctattgatagagcagtttggaaacactcttgttgtggaatgtgcaagtggagttttggagcgctttgaggcctatggtagtaaagggaatagcttcatagaaaaactagacagatgcattctcaggaactttttggtgatgtttgtattcaactcccagagttgaactttcctttggaaagagcagctatgaaacactctttttctagaatctgcaagtggacgtttggagggctttgtggtttgtggtggaaaaggaaatatcttcacctaaatactagacagaagcattctcagaagcttctctgtgatgactgcattcaactcacggagttgaacactccttttgagagcgcagttttgaaactctttctgtggcatctgcaaggggacatgtagacctctttgaagatttcgttggaaacggaatcatcttcacataaaaactatacagaaacagtctcagaatcttctttgtgatgtttgcattcaaatcccagagttgaactttcctttcaaagttcacgtttgaaacactctttttgcaggatctacaagtggatatttggaccactctgtgtccttcgttcaaaacgggtatatcttcacatggtatctagacagaagctttctcagaaaattctttgggatgattgagttgaactcacagagctgaacattccttgcgatgtagcagtttagaaacacactttctgcagaatctgcaagtgcatatttggatctctctgaggaattcgttggaaacgtgataatttcagctgactaaaccgaagcattctcagtaaccttcttcgtgatgtctgcattcaactcacagtgtggaacctttctttgatagttcaggtttgaaacactctttttgtagaaactgcaaggggataattgcacttctttgaggcctaccgtagtaaaggaaataacttcctataaaaagaagacagaagcattctcagaaccctcttcctgatgtttgcattcaactcacagtgctgaacctttctttgatagttcagctttgaaacactctttttgtagaaactgcaagtggatatttggtcctctctgaggatttcgttggaaacgggataaactgcacagaactaaacagaagcattctcagaaccttcttcgtgatgtttgcattcaactcacagtgttgaacctttctttgatagttcaggtttgaaacggtctttctgtagaaactgcaagtagatatttggacctctctgaggatttcgttggaaacgggataacccacacagaactaaaacagaagcattcacagaaaactcttggtgacgactgagtttaactcacagagctgaacattcctttggatggagcagtttcgaaacacactatttgtagaatgtgcaagtggatatttaggcctctctgaggatttcgttggaaacgggataaaccgcacagaactaaacagaagcattctcagaaactactttgtgatgattgcattcaagtcacagagttgaacattccctttgacagagcagtttggaaactctctttgtgtagaatctgcaagtggagatatggaccgctttgaggcctatggtagtaaaggaaatagcttcatataaaagctagacagtagcattctcagaaacttctttgtgatgcttgcattcaactcacagagttgaactttcctttcgagagagaagctttgaaacactctttttccagaatctgcaagtggacatttggagggctttgaggcctgtggtggaaaaggaattatcttcccgtaaaagctagatagaagcattgtcagaaacttctttgtgatgattgcattcaactcacagagttgaaggttccttttcaaagagcagtttccaatcactctttctgtggaatctgcaagtggatatttggacctattttgaagatttcgttggaaacgggagaatcttcacaggaaagctaaacagaagcattctcagaaacttctctgtgatgtttgtgttcaactcccagagtttcacattgcttttcatagagtagttctgaaacatgcttttcgtagtgtctacaagtggacatttggagcgctttcaggcctgtggtggaaaacgaattatggtcacataaaaactggagagaagccttctcagaaacttctctgtgatgattgcattcaactcacagagttgaaccctcctatggatagagcagtgttgaaactctctttttgtggaacctgcaagtggatatgtggacctctccgaagatgtcctttggaaacgggaatatcttcacataaaaactaaacagaagcattctcagaaacttcttggtgatgtttgcattcaaatcccagagttgaaccttcctttgatagttcaggtttgaaacactctttctgtaggatctgcaagtggctatttggaccactctgtggccttcgttcgaaacgggtatatcttcgcataaaatctagacagaagcattctcagaaaatactttgtgatgattgagtttaaatcacagagctgaccattcctttggatggagcaggtttgagacacactttttgtagaatctacaagtggatatttggacctctctgaggatttcgttggaaacgggataactgcacctaactaaacggaagcattctcagaaactgctttgtgatgattgcattcacctcacagagttgaacattcctattgatagagcagtttggaaacactcttgttgtggaatgtgcaagtggagatttggagcgctttgaggcctgtggtagtaaagggaatagcttcatagaaaaactagacagatgcattctcaggaactttttggtgatgtttgtattcaactcccagagttgaactttcctttggaaagagcagctatgaaacactctttttctagaatctgcaagtggacgtttggagggctttgtggtttgtggtggaaaaggaaatatcttcacctaaatactagatagaagcattctcagaagcttctctgtgatgactgcattcaactcacggagttgaacactccttttgagagcgcagttttgaaactctctttctgtggcatctgcaaggggacatgtagacctctttgaagatttcgttggaaacggaatcatcttcacataaaaactatacagaagcagtctcagaatcttctttgtgatgtttgcattcaaatcccagagttgaactttcctttcaaagttcacgtttgaaacactctttttgcaggatctacaagtggatatttggaccactctgtgtccttcgttcgaaacgggtatatcttcacacgacatctagacagaagctttctcaggaaaattctttgggatgattgagtggaactcacagtgctgaacattccttgcgatgtagcagtttagaaacacactttctgcagaatctgcaagtgcatatttggacctctctgaggaattcgttggaaacgggataatttcagctgactaaacagaagcattctcagaaccttcttcgtgatgtctgcattcaactcacagtgtggaacctttctttgatagttcaggtttgaaacactctttttgtagaaactgcaaggggataattgcacttctttgaggcctaccgtagtaaaggaaataacttcctatagaaagaagacagaagcattctcagaaccctcttcgtgatgtttgcattcaactcacagtgctgaacctttctttgatagttcagctttgaaacactcttcttgtagaaactgcaagtggatatttggtcctctctgaggatatcgttggaaacgggataaaccgcacagaactaaacagaagcattctcagagccctcttcgtgatgtttgcattcaactcacagtgctgaacctttctttgatagtgcagctttgaaacactctttttgtagaaactgcaagtggatgtttggtcctctctgaggatttcgttggaaacgggataaaccgcacagaactaaaacagaagcattgtcagaaacttctttgtgatgattgcattcaactcacagagttgaaggttccttttcaaacagcactttccaatcactctttttgtggaatctgcaagtggatatttgggcctctctgaggatttcgttggaaacgggataaaacgcacagaactgaaacagaagcattctcagaaacttctctgtgatgtttgtgttcaactcccagagtttcacgttgcttttcatagagtagttctgaaacatgcttttcgtagtgtctgcaagtggacatttggagcgctttcaggcctgtggtggaaaacgaattatggtcacataaaaactggagagaagccttctcagaaacttctctgtgatgattgcattcaactcacagagttgaaccctcctatggatagagcagtgttgaaactctctttttgtggaatctgcaagtggatatgtggacctctccgaagatgtctttggaaacgggaatatcttcacataaaaactaaacagaagcattctcagaaacttcttggtgatgtttgcattcaaatcccagagttgaaccttcctttgatagttcaggtttgaaacactctttttgtaggatctgcaagtggctatttggaccactctgtggccttcgttcgaaacgggtatatcttcgcataaaatctagacagaagcattctcagaaaatactttgtgatgattgagtttaaatcacagagctgaacattcctttggatggagcaggtttgagacacactttttgtagaatctacaagtggatatttgcacctctctgaggatttcgttggaaacgggataactgcacctaactaaacggaagcattctcagaaactgctttgtgatgattgcattcacctcacagagttgaacattcgtattgatagagcagtttggaaacactcttcttgtggaatgtgcaagtggagatttggagcgctttggggcctatggtagtaaagggaatagcttcatagaaaaactagacagatgcattctcaggaactttttggtgatgtttgtattcaactcccagagttgaactttcctttggaaagagcagctatgaaacactctttttctagaatctgcaagtggacgtttggagggctttgtggtttgtggtggaaaaggaaatatcttcacctaaatactagatagaagcattctcagaagcttctctgtgatgactgcattcaactcacggagttgaacactccttttgagagcgcagttttgaaactctctttctgtggcatctgcaaggggacatgtagacctctttgaagatttcgttggaaacggaatcatcttcacataaaaactatacagaagcagtctcagaatcttctttgtgatgttagcattcaaatcccacagttgaactttcctttcaaagttcacgtttgaaacactctttttgcaggatctacaagtggatatttggaccactctgtgtccttcgttcgaaacgggtatatcttcacacgacatctagacagaagctttctcagaaaattctttgggatgattgagttgaactcacagagctgaacattccttgcgatgtagcagtttagaaacacactttctgcagaatctgcaagtgcatatttggacctctctgaggaattcgttggaaacgggataatttcagctgactaaacagaagcattctcagaaccttcttcgtgatgtctgcattcaactcacagtgtggaacctttctttgatagttcaggtttgaaacactctttttgtagaaactgcaaggggataattgcacttctttgaggcctaccgtagtaaaggaaataacttcctatagaaagaagacagaagcattctcagaaccctcttcgtgatgtttgcattcaactcacagtgctgaacctttctttgatagttcagctttgaaacactcttcttgtagaaactgcaagtggatatttggtcctctctgaggatttcgttggaaacgggataaaccgcacagaactaaacagaagaattctcagagccctcttcgtgatgtttgcattcaactcacagtgctgaacctttctttgatagtgcagctttgaaacactctttttgtagaaactgcaagtggatgtttggtcctctctgaggatttcgttggaaacgggataaaccgcacagaactaaaacagaagcattgtcagaaacttctttgtgatgattgcattcaactcacagagttgaaggttccttttcaaacagcagtttccaatcactctttctgtggaatctgcaagtggatatttgggcctctctgaggatttcgttggaaacgggataaaacgcacagaactaaaacagaagcattctcagaaacttctctgtgatgtttgtgttcaactcccagagtttcacgttgcttttcatagagtagttctgaaacatgcttttcgtagtgtctgcaagtggacatttggagcgctttcaggcctgtggtggaaaacgaattatggtcacataaaaactggagagaagccttctcagaaacttctctgtgatgattgcattcaactcacagagttgaaccctcctatggatagagcagtgttgaaactctctttttgtggaatctgcaagtggatatgtggacctctccgaagatgtctttggaaacgggaatatcttcacataaaaactaaacagaagcattctcagaaacttcttggtgatgtttgcattcaaatcccagagttgaaccttcctttgatagttcaggtttgaaacactctttttgtaggatctgcaagtggctatttggaccactctgtggccttcgttcgaaacgggtatatcttcgcataaaatctagacagaagcattctcagaaaatactttgtgatgattgagtttaaatcacagagctgaacattcctttggatggagcaggtttgagacacactttttgtagaatctacaagtggatatttggacctctctgaggatttcgttggaaacgggataactgcacctaactaaacggaagcattctcagaaactgctttgtgatgattgcattcacctcacagagttgaacattcctattgatagagcagtttggaaacactcttgttgtggaatgtgcaagtggagatttggagcgctttgaggcctatggtagtaaagggaatagcttcatagaaaaactagacagatgcattctcaggaactttttggtgatgtttgtattcaactcccagagttgaactttcctttggaaagagcagctatgaaacactctttttctagaatctgcaagtggacgtttggagggctttgtggtttgtggtggaaaaggaaatatcttcacctaaatactagatagaagcattctcagaagcttctctgtgatgactgcattcaactcacggagttgaacactccttttgagagcgcagttttgaaactctctttctgtggcatctgcaaggggacatgtagacctctttgaagatttcgttggaaacggaatcatcttcacataaaaactatacagaagcagtctcagaatcttctttgtgatgtttgcattcaaatcccagagttgaacttccctttcaaagttcacgtttgaaacactctttttgcaggatctacaagtggatatttggaccactctgtgtccttcgttcgaaacgggtatatcttcacatgacatctagacagaagctttctcagaaaatcctttgggatgattgagtggaactcacagagctgaacattccttgcgatgtagcagtttagaaacacactttctgcagaatctgcaagtgcatatttggacctctctgaggaattcgttggaaacgggataatttcagctgactaaacagaagcattctcagaaccttcttcgtgatgtctgcattcagctcacagtggggaacctttctttgatagttcaggtttgaaacactctttttgcagaaactgcaaggggataatggcacttctttgaggcctaccgtagtaaaggaaataacttcctatagaaagaagacagaagcattctcagaaccctcttcgtgatgtttgcattcaactcacagtgctgaacctttctttgatagttcagctttgaaacactcttcttgtagaaactgcaagtggatatttggtcctctctgaggatttcgttggaaacgggataaaccgcacagaactaaacagaagaattctcagagccctcttcgtgatgtttgcattcaactcacagtgctgaacctttctttgatagtgcagctttgaaacactctttttgtagaaactgcaagtggatatttggtcctctctgaggatttcgttggaaacgggataaaccgcacagaactaaaacagaagcattgtcagaaacttctttgtgatgattgcattcaactcacagagttgaaggttccttttcaaacagcagtttccaatcactctttctgtggaatctgcaagtggatatttgggcctctctgaggatttcgttggaaacgggataaaacgcacagaactaaaacaaaagcattctcagaaacttctctgtgatgtttgtgtgcaactcacagagtttcacattgcttctcatagagtagttctgaaacatgcttttcgtagtgtctgcaagtggacatttggagcgctttcaggcctgtggtggaaaacgaattatggtcacataaaaactggagagaagccttctcagaaacttctctgtgatgattgcattcaactcacagagttgaaccctcctatggatagagcagtgttgaaactctctttttgtggaatctgcaagcggatatgtggacctctccgaagatgtctttggaaacgggaatatcttcacataaaaactaaacagaagcattctcagaaactgctttgtgatgattgcattcacctcacagagttgaacgttcctattgatagagcagttcgtaaacactcttgttgcagaatctgcaagtggatatttggaccactctgtggccttcgttcgaaacgggtacatcttcacataaaatctagacagatgcattctcaggaactttttggtgatgtttgtattcaactcccagagttgaactttcctttggaaagagcagctacgaaacactctttttctagaatctgcaagtggacgtttggagggctttgtggtttgtggtggaaaaggaaatatcttcacctaaatactagatagaagcattctcagaagcttctctgtgatggctgcattcaactcacggagttgaacactccttttgagagcgccgttttgaaactctctttctgtggcatctgcaaggggacatgtagacctctttgaagatttcgttggaaacggaatcatcttcacataaaaactatacagaagcagtctcagaatcttctttgtgatgtttgcattcaaatcccagagttgagctttcctttcaaagttcgcgtttgaaacactctttttgcaggatctacaagtggatatttggacaactctgtgtccttcgttcgaaacgggtatatcttcacatgacatctagacagaagctttctcagaaaattctttgggatgattgagttgaactcacagagctgaacattccttgcgatgtagcagtttagaaacacactttctgcagaatctgcaagtgcatatttggacctctctgaggaattcgttggaaacgggataatttcagctgactaaacagaagcattctcagaaccttcttcgtgatatctgccttcaactcacagtgtggaacctttccttgatagttcaggtttgaaacactctttttgtagaaactgcaaggggataattgcacttctttgaggcctaccgtagtaaaggaaataacttcctatagaaagaagacagaagcattctcagaaccttctttgtgatgtttgcattcaactcacagtgttgaacctttctttgatagttcagctttgaaacactctttttgtagaaactgcaagtggatatttggtcctctctgaggatttcgttggaaacgggataaaccgcacagaactaaacagaagcattcacagaaaactcttggtgacgactgagttcaactcacagagctgaacattcctttggatggagccgtttcgaaacacactatttgtagaatgtgcaagtggatatttgggcctctctgaggatttcgttggaaaagggataaaccgcacagaactaaacagaagcattctcagaaactactttgtgatgattgcattcaagtcacagagctgaacattccctttgacagagcagtttggaaactctctttgtgtagaatctgcaagtggagatatggaccgctttgaggactatggtagtaaaggaaatagcttcatataaaagctagacagtagcattctcagaaacttctttgtgatgcttgcattcaactcacagagttgaactttcctttcgagagagaagctttgaaacactctttttccagaatctgcaagtggacatttggagggctttgaggcctgtggtggaaaaggaattatcttcccgtaaaagctagatagaagcattgtcagaaacttctttgtgatgattgcattcaactcacagagttgaaggttccttttcaaagagcagtttccaatcactctttgtgtggaatctgcaagtggatatttggacctattttgaagatttcgttggaaacgggagaatcttcacaggaaagctaaacagaagcattctcagaaacttctctgtgatgtttgtgttcaactcccagagtttcacattgcttttcatagagtagttctgaaacatgcttttcgtagtgtctacaagtggacatttggagcgctttcaggcctgtggtggaaaacgaattatggtcacataaaaactggagagaagccttctcagaaacttctctgtgatgattgcattcaactcacagagttgaaccctcctatggatagagcagtgttgaaactctctttttgtggaatctgcaagtggatatgtggacctctccgaagatgtctttggaaacgggaatatcttcacataaaaactaaacagaagcattctcagaaacttcttggtgatgtttgcattcaaatcccagagttgaaccttcctttgatagttcaggtttgaaacactctttttgtaggatctgcaagtggatatttggaccacactgtggccttcgttcgaaacgggtacatcttcgcataaaatctagacagaagcattctcagaaaatactttgtgatgattgagtttaactcacagagctgaacattcctttggatggagcaggtttgagacacactttttgtagaatctacaagtggatatttcgacctctctgaggatttcgttggaaacgggataactgcacctaactaaacggaagcattctcagaaactgctttgtgatgattgcattcacctcacagagttgaacattcctattgatagagcagtttggaaacactcttgttgtggaatgtgcaagtggagatttggagcgctttgaggcctatggtagtaaagggaatagcttcatagaaaaacaaggcagatgcattctcaggaactttttggtgatgtttgtattcaactcccagagttgaactttcctttggaaagagcagctatgaaacactctttttctagaatctgcaagtggacgtttggagggctttgtggtttgtggtggaaaaggaaatatcttcacctaaatactagatagaagcattctcagaagcttctctgtgatgactgcattcaactcacggagttgaacactccttttgagagcgcagttttgaaactctctttctgtggcatccgcaaggggacatgtggacctctttgaagatttcgttggaaacggaatcatcttcacataaaaactatacagaagcagtctcagaatcttctttgtgatgtttgcattcaaatcccagagttgaactttcctttcaaagttcacgtttgaaacactatttttgcaggatctacaagtggatatttggaccactctgtgtcctccgttcgaaacgggtatatcttcacatgacatctagacagaagctttctcagaaaattctttgggatgattgagtggaactcacagagctgaacattccttgcgatgtagcagtttagaaacacactttctgcagaatctgcaagtgcatatttggacctctctgaggaattcgttggaaacgggataatttcagctgactaaacagaagcattctcagaaccttcttcgtgatgtctgcattcaactcacagtgtggaacctttctttgatagttcaggtttgaaacactctttttgtagaaactgcaaggggataattgcacttctttgaggcctaccgtagtaaaggaaataacttcctatagaaagaagacagaagcattctcagaaccctcttcgtgatgtttgcattcaactcacagtgctgaacctttctttgatacttcagctttgaaacactcttcttgtagaaactgcaagtggatatttggtcctctctgaggatttccttcgaaacgggataaaccgcacagaactaaacagaagcattctcagaaccttcttcgtgatgtttgcattcaactcacagtgttgaacctttccttgatagttcaggtttgaaacggtctttctgtagaaaatgcaagtagatatttggacctctctgaggatttcgttggaaacgggataaaccgcacagaactaaaacagaagcattctcagaaccctcttcgtgatgtttgcattcaactcacagtgctgaacctttctttgatagtgcagctttgaaacactctttttgtagaaactgcaagtggatatttggtcctctctgaggatttcgttggaaacgggataaaccgcacagaactaaaacagaagcattcacagaaaactcttggtgacgactgagtttaactcacagagctgaacattcctttggatggagcagtttcaaaacacactatttgtagaatctgcaagtggatatgtgggcctctctgaggatttcgttggaaacgggataaaccgcacagaactaaaacagaagcattctcagaaactactttgtgatgattgcattcaagtcacagagttgaacattccctttgacagagcagtttggaaactctctttgtgtagaatctgcaagtggagatatggaccgctttgaggcctatggtagtaaaggaaatagcttcatataaaagctagacagtagcattctcagaaacttctttgtgatgcttgcattcaactcacagagttgaactttcctttcgagagagaagctttgaaacactctttttccagaatgtgcaagtggacatttggggagctttgaggcctgtggtggaaaaggaattatcttcccgtaaaagctagatagaagcattgtcagaaacttctttgtgatgattgcattcaactcacagagttgaaggttccttttcaaacagcagtttccaatcactctttctgtggaatctgcaagtggatatttcgacctctttgaagatttcgttggaaacgggagaatcttcacagaaaagctaaacagaagcattctcagaaacttctctgtgatgtttgtgttcaactcccagagtttcacgttgcttttcatagagtagttctgaaacatgcttttcgtagtgtctgcaagtggacatttggagcgctttcaggcctgtggtggaaaacgaattatggtcacataaaaactggagagaagccttctcagaaacttctctgtgatgattgcattcaactcacagagttgaaccctcctatggatagagcagtgttgaaactctctttttgtggaatctgcaagtggatatgtggacctctccgaagatgtctttggaaacgggaatatcttcacataaaaactaaacagaagcattctcagaaacttcttggtgatgtttgcattcaaatcccagagttgaaccttcctttgatagttcaggtttgaaacactctttctgtaggatctgcaagtggctatttggaccactctgtggccttcgttcgaaacgggtatatcttcgcataaaatctagacagaagcattctcagaaaatactttgtgatgattgagtttaaatcacagagctgaccattcctttggatggagcaggtttgagacacactttttgtagaatctacaagtggatatttggacctctctgaggatttcgttggaaacgggataactgcacctaactaaacggaagcattctcagaaactgctttgtgatgattgcattcacctcacagagttgaacattcctattgatagagcagtttggaaacactcttgttgtggaatgtgcaagtggagatttggagcgctttgaggcctatggtagtaaagggaatagcttcatagaaaaactagacagatgcattctcaggaactttttggtgatgtttgtattcaactcccagagttgaactttcctttggaaagagcagctatgaaacactctttttctagaatctgcaagtggacgtttggagggctttgtggtttgtggtggaaaaggaaatatcttcacctaaatactagatagaagcatcctccgaagcttctctgtgatgactgcattcaactcacggagttgaacactccttttgagagcgcagttttgaaactctctttctgtggcatctgcaaggggacatgtagacctctttgaagatttcgttggaaacggaatcatcttcacataaaaactatacagaagcagtctcagaatcttctttgtgatgtttgcattcaaatcccagagttgaactttcctttcaaagttcacgtttgaaacactctttttgcaggatctacaagtggatatttggaccactctgtgtccttcgttcgaaacgggtatatcttcacatgacatctagacagaagctttctcagaaaattctttgggatgattgagttgagcaaacagagctgaacactccttgcgatgtagcagtttagaaacacactttctgcagaatctgcaagtgcatatgtggaactctctgaggaattcgttggaaacgggataatttcagctgactaaacagaagcattctcagaaccttcttcgtgatgtctgcgttcaactcacagtgtggaacctttctttgatagttcaggtttgaaacactctttttgtagaaactgcaaggggatcattgcacttctttgaggcctaccgtagtaaaggagataacttcctacaaaaagaagacagaagcattctcagaaccctcttcgtgatgtttgcattcaacccacggtgctgaacctttctttgatagttcagctttgaaacactctttttgtagaaactgcaagtggatatttggtcctctctgaggatttcgttggaaacgggataaaccgcacagaactaaacagaagcattctcagaaccttcttcgtgatgtttgcattcaactcacagtgttgaacctttctttgatagttcaggtttgaaacggtctttctgtagaaactgcaagtagatatttggacctctctgaggatttcgttagaaaccggataaaccgcacagaactaaaacagaagctttcacagaaaactcttggtgacgactgagtttaactcacagagctgaacattcctttggatggagcagtttcgaaacacactatttgtagaatgtgcaagtggatatgtgggcctctctgaggatttcgttggaaacgggataaaccgcccagaactaaacagaagcattctcagaaactactttgtgatgattgcattcaagtcacagtagttgaacattccctttgacagagcagtttggaaactctctttgtgtagaatctgcaagtggagatatggaccgctttgaggcctatggtagtaaaggaaatagcttcatataaaagctagacagtagcattctcagaaacttctttgtgatgcttgcattcaactcacagagttgaactttcctttcgagagagaagctttgaaacactctttttccagaatctgcaagtggacatttggagggctttgaggcctgtggtggaaaaggaattatcttcccgtaaaagctagatagaagcattgtcagaaacatcttcgtgatgattgcattcaactcacagagttgaaggttcctttacaaacagcagtttccaaacactctttctgtggaatctgcaagtggatatttggacctctttgcatatttccttggaaacgggataatcttcacagaaaagctaaacagaagcattctcagaaacttctctgtgatgtttgtgttcaactcccagagtttcacatggcttctcatagagtagttctgaaacatgcttttcatagtgtctgcaagtggacatttggagtgctttcaggcctgtggtggaaaacgaattatggtcacataaaaactggagagaagccttctgagaaacttctctgtgatgattgcattcaactcacagagttgaaacctcctatggatagagcagtgttgaaactctctttttgtggaatctgcaagtggatatgtggacccctccgaagatgtctttggaaacgggaatatcttcacataaaaactacacagaagcattctcagaaactgctttgtgatgattgcattcacctcacagagttgaacattcctattgatagagcagttcgtaaacactcttgttgcagaatctgcaagtggatatttggaccactctgtggccttcgttcgaaacgggtacatcttcacataaaatctagagagaagcattctcagaaaatactttgtgatgattgagtttaactcacagagctgaacattcctttggatggagcaggtttgagacacactttttgtagaatctaaaagtggatatttggacctctctgaggatttcgttggaaacgggataactgcacctaactaaacggaagcattctcagaaactgctttgtgatgattgcattcacctcacagagttgaacattcctattgatagagcagtttggaaacactcttgttgtggaatgtgcaagtggagatttggcgcgctttgaggcctatggtagtaaagggaatagcttcatagaaaaactagacagatgcattctcaggaactttttggtgatgtttgtattcaactcccagagttgaactttcctttggaaagagcagctatgaaacactctttttctagaatctgcaagtggacgtttggagggctttgtggtttgtggtggaaaaggaaatatcttcacctaaatactagatagaagcattctcagaagcttctctgtgatgactgcattcaactcacggagttgaacactccttttgagagcgcagttttgaaactctctttctgtggcatctgcaaggggacatgtagacctctttgaagatttcgttggaaacggaatcatcttcacataaaaactatacagaagcagtctcagaatcttctttgtgatgtttgcattcaaatcccagagttgaactttcctttcaaagttcacgtttgaaacactctttttgcaggatctacaagtggatatttggaccactctgtgtccttcgttcgaaacgggtatatcttcacacgacatctagacagaagctttctcagaaaattctttgggatgattgagttgagcaaacagagctgaacactccttgcgatgtagcagtttagaaacaccctttctgcagaatctgcaagtgcatatgtggacctctctgaggaattcgttggaaacgggataacttcagctgactaaacagaagcattctcagaaccttcttcgtgatgtctgcattcaactcacagtgtggaacctttctttgatagttcaggtttgaaacactctttttgtagaaactgcaaggggataattgcacttctttgaggcctaccgtagtaaaggaaataacttcctatagaaagaagacagaagcattctcagaaccctcttcgtgatgtttgcattcaacacacagtgctgaacctttctttgatagttcagctttgaaacactcttcttgtagaaactgcaagtggatatttggtcctctctgaggatttcgttggaaacgggataaaccgcacagaactaaacagaagcattctcagaacttcttcgtgatgtttgcattcaactcacagtgttgaacctttctttgatagttcaggtttgaaacggtctttctgtagaaactgcaagtagatatttggacctctctgaggatttcgttggaaacgggataacccgcacagaactaaaacagaagcattcacagaaaactcttggtgacgactgagtttaactcacagagctgaacattcctttggatggagcagtttcgaaacacactatttgtagaatgtgcaagtggatatttaggcctctactgaggatttcgttggaaacgggataaaccgcacagaactaaacagaagcattctcagaaactactttgtgatgattgcattcaagtcacagagttgaacattccctttgacagagcagtttggaaactctctttgtgtagaatctgcaagtggagatatggaccgctttgaggcctatggtagtaaaggaaatagcttcatataaaagctagacagtagcattctcagaaacttctttgtgatgcttgcattcaactcacagagttgaactttcctttcgagagagaagctttgaaacactctttttccagaatgtgcaagtggacatttggggagctttgaggcctgtggtggaaaaggaattatcttcctgtaaaagctagatagaagcattgtcagaaacttctttgtgatgattgcattcaactcacagagttgaaggttccttttcaaacagcagtttccaatcactctttctgtggaacctgcaagtggatatttcgacctctttgaagatttcgttggaaacgggagaatcttcacagaaaagctaaacagaagcattctcagaaacttctctgtgatgtttgtgttcaactcccagagtttcacgttgcttttcatagagtagttctgaaacatgcttttcgtagtgtctgcaagtggacatttggagcgctttcaggcctgtggtggaaaacgaattatggtcacataaaaactggagagaagccttctcagaaacttctctgtgatgattgcattcaactcacagagttgaaccctcctatggatagagcagtgttgaaactctctttttgtggaatctgcaagtggatatgtggacctctccgaagatgtctttggaaacgggaatatcttcacataaaaactaaacagaagcattctcagaaacttcttggtgatgtttgcattcaaatcccagagtggaaccttcctttgatagttcaggtttgaaacactctttctgtaggatctgcaagtggctatttggaccactctgtggccttcgttcgaaacgggtatatcttcgcataaaatctagacagaagcattctcagaaaatactttgtgatgattgagtttaaatcacagagctgaccattcctttggatggagcaggtttgagacacactttttgtagaatctacaagtggatatttggacctctctgaggatttcgttggaaacgggataactgcacctaactaaacggaagcattctcagaaactgctttgtgatgattgcattcacctcacagagttgaacattcctattgatagagcagtttggaaacactcttgttgtggaatgtgcaagtggagatttggagcgctttgaggtctatggtagtaaagggaatagcttcatagaaaaactagacagatgcattctcaggaactttttggtgatgtttgtattcaactcccagagttgaactttcctttggaaagagcagctatgaaacactctttttctagaatctgcaagtggacgtttggagggctttgtggtttgtggtggaaaaggaaatatcttcacctaaatactagacagagtcattctcagtaagcttctctgtgatgactgcattcaactcacggagttgaacactccttttgagagcgcagttttgaaactctctttctgtggcatctgcaaggggacatgtagacctctttgaagatttcgttggaaacggaatcatcttcacataaaaactatacagaagcagtctcagaatcttctttgtgatgtttgcattcaaatcccagagttgaactttcctttcaaagttcacgtttgaaacactctttttgcaggatctacaagtggatatttggaccactctgtgtccttcgttcgaaacgggtatatcttcacacgacatctagacagaagctttctcagaaaattctttgggatgattgagtggaactcacagagctgaacattccttgcgatgtagcagtttagaaacacactttctgcagaatctgcaagtgcatatttggacctctctgaggaattcgttggaaacgggataatttcagctgactaaacagaagcattctcagaaccttcttcgtgatgtctgcattcaactcacagtgtggaacctttctttgatagttcaggtttgaaacactctttttgtagaaactgcaaggggataattgcacttctttgaggcctaccgtagtaaaggaaataacttcctatagaaagaagacagaagcattctcagaaccctcttcgtgatgtttgcattcaactcacagtgctgaacctttctttgatagttcagctttgaaacactcttcttgtagaaactgcaagtggatatttggtcctctctgaggatttcgttggaaacgggataaaccgcacagaactaaacagaagaattctcagagccctcttcgtgatgtttgcattcaactcacagtgctgaacctttctttgatagtgcagctttgaaacactctttttgtagaaactgcaagtggatgtttggtcctctctgaggatttcgttggaaacgggataaaccgcacagaactaaaacagaagcattgtcagaaacttctttgtgatgattgcattcaactcacagagttgaaggttccttttcaaacagcagtttccaatcactctttctgtggaatctgcaagtggatatttgggcctctctgaggatttcgttggaaacgggataaaacgcacagaactaaaacagaagcattctcagaaacttctctgtgatgtttgtgttcaactcccagagtttcacgttgcttttcatagagtagttctgaaacatgcttttcgtagtgtctgcaagtggacatttggagcgctttcaggcctgtggtggaaaacgaattatggtcacataaaaactggagagaagccttctcagaaacttctctgtgatgattgcattcaactcacagagttgaaccctcctatggatagagcagtgttgaaactctctttttgtggaatctgcaagtggatatgtggacctctccgaagatgtctttggaaacgggaatatcttcacataaaaactaaacagaagcattctcagaaacttcttggtgatgtttgcattcaaatcccagagttgaaccttcctttgatagttcaggtttgaaacactctttttgtaggatctgcaagtggctatttggaccactctgtggccttcgttcgaaacgggtatatcttcacataaaatctagacagaagcattctcagaaaatactttgtgatgattgagttgaactcacagagctgaacattcctttggatggagcaggtttgagacacactttttgtagaatctacaagtggatatttggacctctctgaggatttcgttggaaacgggataactgcacctaactaaacggaagcattctcagaaactgctttgtgatgattgcattcacctcacagagttgaacattcctattgatagagcagtttggaaacactcttcttgtggaatgtgcaagtggagatttggagcgctttgaggcctatggtagtaaagggaatagcttcatagaaaaattagacagatgcattctcaggaactttttggtgatgtttgtattcaactcccagagttgaactttcctttggaaagagcagctatgaaacactctttttctagaatctgcaagtggacgtttggagggctttgtggtttgtggtggaaaaggaaatatcttcacctaaatactagagagaagcattctcagaagcttctctgtgatgactgcattcaactcacggagttgaacactccttttgagagcgcagttttgaaactctctttctgtggcatctgcaaggggacatgtagacctctttgaagatttcattggaaacggaatcatcttcacataaaaactatacagaagcagtctcagaatcttctttgtgatgtttgcattcaaatcccagagttgaactttcctttcaaagttcacgtttgaaacactctttttgcaggatctacaagtggatatttggaccactctgtgtccttcgttcgaaacgggtatatcttcacacgacatctagacagaagctttctcagaaaattctttgggatgattgagtggaactcacagagctgaacattccttgcgatgtagcagtttagaaacacactttctgcagaatctgcaagtgcatatttggacctctctgaggaattcgttggaaacgggataatttcagctgactaaacagaagcattctcagaaccttcttcgtgatgtctgcattcaactcacagtgtggaacctttctttgatagttcaggtttgaaacactctttttgtagaaactgcaaggggataattgcacttctttgaggcctaccgtagtaaaggaaataacttcctatagaaagaagacagaagcattctcagaaccctcttcgtgatgtttgcattcaactcacagtgctgaacctttctttgatagttcagctttgaaacactcttcttgtagaaactgcaagtggatatttggtcctctctgaggatttcgttggaaacgggataaaccgcacagaactaaacagaagaattctcagagccctcttcgtgatgtttgcattcaactcacagtgctgaacctttctttgatagtgcagctttgaaacactctttttgtagaaactgcaagtggatgtttggtcctctctgaggatttcgttggaaacgggataaaccgcacagaactaaaacagaagcattgtcagaaacttctttgtgatgattgcattcaactcacagagttgaaggttccttttcaaacagcagtttccaatcactctttctgtggaatctgcaagtggatatttgggcctctctgaggatttcgttggaaacgggataaaacgcacagaactaaaacagaagcattctcagaaacttctctgtgatgtttgtgttcaactcccagagtttcacgttgcttttcatagagtagttctgaaacatgcttttcgtagtgtctgcaagtggacatttggagcgctttcaggcctgtggtggaaaacgaattatggtcacataaaaactggagagaagccttctcagaaacttctctgtgatgattgcattcaactcacagagttgaaccctcctatggatagagcagtgttgaaactctctttttgtggaacctgcaagtggatatgtggacctctccgaagatgtctttggaaacgggaatatcttcacataaaaactaaacagaagcattctcagaaacttcttggtgatgtttgcattcaaatcccagagttgaaccttcctttgatagttcaggtttgaaacactctttctgtaggatctgcaagtggctatttggaccactctgtggccttcgttcgaaacgggtatatcttcgcataaaatctagacagaagcattctcagaaaatactttgtgatgattgagtttaaatcacagagctgaccattcctttggatggagcaggtttgagacacactttttgtagaatctacaagtggatatttggacctctctgaggatttcgttggaaacgggataactgcacctaactaaacggaagcattctcagaaactgctttgtgatgattgcattcacctcacagagttgaacattcctattgatagagcagtttggaaacactcttgttgtggaatgtgcaagtggagatttggagcgctttgaggcctgtggtagtaaagggaatagcttcatagaaaaactagacagatgcattctcaggaactttttggtgatgtttgtattcaactcccagagttgaactttcctttggaaagagcagctatgaaacactctttttctagaatctgcaagtggacgtttggagggctttgtggtttgtggtggaaaaggaaatatcttcacctaaatactagatagaagcattctcagaagcttctctgtgatgactgcattcaactcacggagttgaacactccttttgagagcgcagttttgaaactctctttctgtggcatctgcaaggggacatgtagacctctttgaagatttcgttggaaacggaatcatcttcacataaaaactatacagaagcagtctcagaatcttctttgtgatgtttgcattcaaatcccagagttgaactttcctttcaaagttcacgtttgaaacactctttttgcaggatctacaagtggatatttggaccactctgtgtccttcgttcgaaacgggtatatcttcacacgacatctagacagaagctttctcagaaaattctttgggatgattgagtggaactcacagagctgaacattccttgcgatgtagcagtttagaaacacactttctgcagaatctgcaagtgcatatttggacctctctgaggaattcgttggaaacgggataatttcagctgactaaacagaagcattctcagaaccttcttcgtgatgtctgcattcaactcacagtgtggaacctttctttgatagttcaggtttgaaacactctttttgtagaaactgcaaggggataattgcacttctttgaggcctaccgtagtaaaggaaataacttcctatagaaagaagacagaagcattctcagaaccctcttcgtgatgtttgcattcaactcacagtgctgaacctttctttgatagttcagctttgaaacactcttcttgtagaaactgcaagtggatatttggtcctctctgaggatttcgttggaaacgggataaaccgcacagaactaaacagaagaattctcagagccctcttcgtgatgtttgcattcaactcacagtgctgaacctttctttgatagtgcagctttgaaacactctttttgtagaaactgcaagtggatgtttggtcctctctgaggatttcgttggaaacgggataaaccgcacagaactaaaacagaagcattgtcagaaacttctttgtgatgattgcattcaactcacagagttgaaggttccttttcaaacagcagtttccaatcactctttctgtggaatctgcaagtggatatttgggcctctctgaggatttcgttggaaacgggataaaacgcacagaactaaaacagaagcattctcagaaacttctctgtgatgtttgtgttcaactcccagagtttcacgttgcttttcatagagtagttctgaaacatgcttttcgtagtgtctgcaagtggacatttggagcgctttcaggcctgtggtggaaaacgaattatggtcacataaaaactggagagaagccttctcagaaacttctctgtgatgattgcattcaactcacagagttgaaccctcctatggatagagcagtgttgaaactctctttttgtggaatctgcaagtggatatgtggacctctccgaagatgtctttggaaacgggaatatcttcacataaaaactaaacagaagcattctcagaaacttcttggtgatgtttgcattcaaatcccagagttgaaccttcctttgatagttcaggtttgaaacactctttctgtaggatctgcaagtggctatttggaccactctgtggccttcgttcgaaacgggtatatcttcgcataaaatctagacagaagcattctcagaaaatactttgtgatgattgagtttaaatcacagagctgaccattcctttggatggagcaggtttgagacacactttttgtagaatctacaagtggatatttggacctctctgaggatttcgttggaaacgggataactgcacctaactaaacggaagcattctcagaaactgctttgtgatgattgcattcacctcacagagttgaacattcctattgatagagcagtttggaaacactcttgttgtggaatgtgcaagtggagatttggagcgctttgaggcctgtggtagtaaagggaatagcttcatagaaaaactagacagatgcattctcaggaaccttttggtgatgtttgtattcaactcccagagttgaactttcctttggaaagagcagctatgaaacactctttttctagaatctgcaagtggacgtttggagggctttgtggtttgtggtggaaaaggaaatatcttcacctaaatactagatagaagcattctcagaagcttctctgtgatgactgcattcaactcacggagttgaacactccttttgagagcgcagttttgaaactctctttctgtggcatctgcaaggggacatgtagacctctttgaagatttcgttggaaacggaatcatcttcacataaaaactatacagaagcagtctcagaatcttctttgtgatgtttgcattcaaatcccagagttgaactttcctttcaaagttcacgtttgaaacactctttttgcaggatctacaagtggatatttggaccactctgtgtccttcgttcgaaacgggtatatcttcacacgacatctagacagaagctttctcagaaaattctttgggatgattgagtggaactcacagagctgaacattccttgcgatgtagcagtttagaaacacactttctgcagaatctgcaagtgcatatttggacctctctgaggaattcgttggaaacgggataatttcagctgactaaacagaagcattctcagaaccttcttcgtgatgtctgcattcaactcacagtgtggaacctttctttgatagttcaggtttgaaacactctttttgtagaaactgcaaggggataattgcacttctttgaggcctaccgtagtaaaggaaataacttcctatagaaagaagacagaagcattctcagaaccctcttcgtgatgtttgcattcaactcacagtgctgaacctttctttgatagttcagctttgaaacactcttcttgtagaaactgcaagtggatatttggtcctctctgaggatttcgttggaaacgggataaaccgcacagaactaaacagaagaattctcagagccctcttcgtgatgtttgcattcaactcacagtgctgaacctttctttgatagtgcagctttgaaacactctttttgtagaaactgcaagtggatgtttggtcctctctgaggatttcgttggaaacgggataaaccgcacagaactaaaacagaagcattgtcagaaacttctttgtgatgattgcattcaactcacagagttgaaggttccttttcaaacagcagtttccaatcactctttctgtggaatctgcaagtggatatttgggcctctctgaggatttcgttggaaacgggataaaacgcacagaactaaaacagaagcattctcagaaacttctctgtgatgtttgtgttcaactcccagagtttcacgttgcttttcatagagtagttctgaaacatgcttttcgtagtgtctgcaagtggacatttggagcgctttcaggcctgtggtggaaaacgaattatggtcacataaaaactggagagaagccttctcagaaacttctctgtgatgattgcattcaactcacagagttgaaccctcctatggatagagcagtgttgaaactctctttttgtggaatctgcaagtggatatgtggacctctccgaagatgtctttggaaacgggaatatcttcacataaaaactaaacagaagcattctcagaaacttcttggtgatgtttgcattcaaatcccagagttgaaccttcctttgatagttcaggtttgaaacactctttctgtaggatctgcaagtggctatttggaccactctgtggccttcgttcgaaactggtatatcttcgcataaaatctagacagaagcattctcagaaaatactttgtgatgattgagtttaaatcacagagctgaccattcctttggatggagcaggtttgagacacactttttgtagaatctacaagtggatatttggacctctctgaggatttcgttggaaacgggataactgcacctaactaaacggaagcattctcagaaactgctttgtgatgattgcattcacctcacagagttgaacattcctattgatagagcagtttggaaacactcttgttgtggaatgtgcaagtggagatttggagcgctttgaggcctatggtagtaaagggaatagcttcatagaaaaactagacagatgcattctcaggaactttttggtgatgtttgtattcaactcccagagttgaactttcctttggaaagagcagctatgaaacactctttttctagaatctgcaagtggacgtttggagggctttgtggtttgtggtggaaaaggaaatatcttcacctaaatactagagagaaagcattctcagtaagcttctctgtgatgactgcattcaactcacggagttgaacactccttttgagagcgcagttttgaaactctctttctgtggcatctgcaaggggacatgtagacctctttgaagatttcgttggaaacggaatcatcttcacataaaaactatacagaagcagtctcagaatcttctttgtgatgtttgcattcaaatcccagagttgaactttcctttcaaagttcacgtttgaaacactctttttgcaggatctacaagtggatatttggaccactctgtgtccttcgttcgaaacgggtatatcttcacatgacatctagacagaagctttctcagaaaattctttgggatgattgagtggaactcacagagctgaacattccttgcgatgtagcagtttagaaacacactttctgcagaatctgcaagtgcatatttggacctctctgaggaattcgttggaaacgggataatttcagctgactaaacagaggcattctcagaaccttcttcatgatgtctgcattcaactcacagtgtggaacctttctttgatagttcaggtttgaaacactctttttgtagaaactgcaaggggataattgcacttctttgaggcctaccgtagtaaaggaaataacttcctatagaaagaagacagaagcattctcagaaccttcttcgtgatgtttgcattcaactcacagtgctgaacctttctttgatagttcagcattgaaacactctttttgtagaaactgcaagtggatatttcgtcctctctgaggatttcgttggaaacgggataactgcacctaactaaacggaagcattctcagaaccttcttcgtgatgtttgcattcaactcacagtgttgaacctttctttgatagttcaggtttcaaacggtctttctgtagaaactgcaagtagatatttggacctctctgaggatttcgttggaaacgggataacccgcacagaactaaaacagaagcattcacagaaaactcttggtgacgactgagtttaactcacagagctgaacattcctttggatggagcagtttcgaaacacactatttgtagaatgtgcaagtggatatgtgggcctctctgaggatttcgttggaaacgggataaaccgcacagaactaaacagaagcattctcagaaactactttgtgatgattgcattcaagtcacagagttgaacattccctttgacagagcagtttggaaactctctttgtgtagaatctgcaagtggagatatggaccgctttgaggcctatggtagtaaaggaaatagcttcatataaaagctagacagtagcatcctcagaaacttctttgtgatgcttgcattcaactcacagagttgaactttcctttcgagagagaagctttgaaacactctttttccagaatctgcaagtggacatttggagggctttgaggcctgtggtggaaaaggaattatcttcccgtaaaagctagatagaagcattgtcagaaacttctttgtgatgattgcattcaagtcacagagttgaaggttccttttcaaagagcagtttccaatcactctttctgtggaatctgcaagtggatatttggacctctttgaagatttcgttggaaacgggagaatcttcacagaaaagctaaacagaagcattctcagaaacttctctgtgatgtttgtgttcaactcccagagtttcacattgcttctcatagagtagttctgaaacatgcttttcgtagtgtctgcaagtggacatttggagcgctttcaggcctgtggtggaaaacgaattatggtcacataaaaactggagagaagccttctcagaaacttctctgggatgattgcattcaactcacagagttgaaccctcctatggatagagcagtgttgaaactctctttttgtggaatctgcaagcggatatgtggacctctccgaagatgtctttggcaacgggaatatcttcacataaaaactaaacagaagcattctcagaaacttcttggtgatgtttgcattcaaatcccagagttgaaccttcctttgagagttcaggtttgaaacactctttttgtaggatctgcaagtggatatttggaccactctgtggccttcgttcgaaacgggtacatcttcgcataaaatctagacagaagcattctcagaaaatactttgtgatgattgagttgaactcacagagctgaacattcctttggatggagcaggtttgagacacactttttgtagaatctacaagtggatatttggacctctctgaggatttcgttggaaacgcgataactgcacctaactaaacggaagccttctcagaaactgctttgtgatgattgcattcacttcacagagttgaacattcctattgatagagcagtttggaaacactcttgttgtggaatgtgcaagtggagatttggagcgctttgaggcctatggtagtaaagggaatagcttcatagaaaaactagacagatgcattctcaggaactttttggtgatgtttgtattcaactcccagagttgaactttcctttggaaagagcagctatgaaacactctttttctagaatctgcaagtggacgtttggagggctttgtggtttgtggtggaaaaggaaatatcttcacctaaatactagatagaagcattctcagaagcttctctgtgatgactgcattgaactcacggagttgaacactccttttgagagcgcagttttgaaactctctttctgtggcatccgcaaggggacatgtggacctctttgaagatttcgttggaaacggaatcatcttcacataaaaactatacagaagcagtctcagaatcttctttgtgatgtttgcattcaaatcccagagttgaactttcctttcaaagttcacgtttgaaacactctttttgcaggatctacaagtggatatttggaccactctgtgtccttcgttcgaaacgggtatatcttcacatgacatctagacagaagctttctcagaaaattgtttgggatgattgacttgaactcacagagctgagcattccttgcgatgtagcagtttagaaacacactttctgcagaatctgcaagtgcatatttggacctctctgaggaattcgttggaaacgggataatttcagctgactaaacagaaacattctcagaaccttcttcgtgatgtctgcattcaactcacagtgtggaacctttctttgatagttcaggtttgaaacactctttttgtagaaacttcaaggggataattgcacttctttgaggcctaccgtagtaaaggaaataacttcctatagaaagaagacagaagcattctcagaaccctcttcgtgatgtttgcattcaactcacagtgctgaacctttctttgatagttcagctttgaaacactcttcttgtagaaactgcaagtggatatttggtcctctctgaggatttcgttggaaacgggataaaccgcacagaactaaacagaagcattctcagaaccttcttcgtgatgtttgcattcaactcacagtgttgaacctttctttgatagttcaggttggaaacggtctttatgtagaaactgcaagtagatatttggacctctctgaggatttcgttggaaacgggataaaccgcacagaactaaaacagaagcattcacagaaaactcttggtgacgaatgagtttaactcacagagctgaacattcctttggatggagcagtttcgaaacacactatttgtagaatctgcaagtggatatttgggcctctctgaggatttcgttggaaacgggataaaccgcacagaactaaagagaagcattctcagaaactactttgtgatgattgcattcaagtcacagagttgaacattccctttgacagagcagtttggaaactctctttgtgtagaatctgctagtggagatatggaccgctttgaggcctatggtagtaaaggaaatagcttcatataaaagctagacagtagcattctcagaaacttctttgtgatgcttgcattcaactcacagagttgaactttcctttcgagagagaagctttgaaacactctttttccagaatctgcaagtggacatttggagggctttgaggcctgtggtggaaaaggaattatcttcccgtaaaagctagatggaagcattgtcagaaacttctttgtgatgattgcattcaactcacagagttgaaggttccttttcaaagagcagtttccaatcactctttctgtggaatctgcaagtggatatttggacctattttgaagatttcgttggaaacgggataatcttcacagaaaagctaaacagaagcattctcagaaacttctctgtgatgtttgtgttcaactcccagagtttcacattgcttttcatagagtagttctgaaacatgcttttcgtagtgtctgcaagtggacatttggagcgctttcaggcctgtggtggaaaacgaattatggtcacataaaaactggagagaagccttctcagaaacttctctgtgatgattgcattcaactcacagagttgaaccctcctatggatagagcagtgttgaaactctctttttgtggaatctgcaagtggatatgtggacctctccgaagatgtctttggaaacgggaatatcttcacataaaaactaaacagaagcattctcagaaacttcttggtgatgtttgcattcaaatcccagagttgaaccttcctttgatagttcaggtttgaaacactctttttgtaggatctgcaagtggatatttggaccactctgtggccttcgttcgaaacgggtatatcttcgcataaaatctagacagaagcattctcagaaaatactttgtgatgattgagtttaactcacagagctgaacattcctttggatggagcaggtttgagacacaccttttgtagaatctacaagtggatatttggacctctcctgaggatttcgttggaaacgggataactgcacctaactaaacggaagcattctcagaaactgctttgtgatgattgcattcacctcacagagttgaacattcctattgatagagcagtttggaaacactcttgttgtggaatgtgcaagtggagatttggagcgctttgaggcctatggtagtaaagggaatagcttcatagaaaaactagacagatgcattctcaggaactttttggtgatgtttgtattcaactcccagagttgaactttcctttggaaagagcagctatgaaacactctttttctagaatctgcaagtggacgtttggagggctttgtggtttgtggtggaaaaggaaatatcttcacctaaatactagatagaagcattctcagaagcttctctgtgatgactgcattcaactcacggagttgaacactccttttgagagcgcagttttgaaactctctttctgtggcatctgcaaggggacatgtagacctctttgaagatttcgttggaaacggaatcatcttcacataaaaactatacagaagcagtctcagaatcttctttgtgatgtttgcattcaaatcccagagttgaactttcctttcaaagttcacgtttgaaacactctttttgcaggatctacaagtggatatttggaccactctgtgtccttcgttcgaaacgggtatatcttcacacgacatctagacagaagctttctcagaaaattctttgggatgattgagtggaactcacagagctgaacattccttgcgatgtagcagtttagaaacacactttctgcagaatctgcaagtgcatatttggacctctctgaggaattcgttggaaacgggataatttcagctgactaaacagaagcattctcagaaccttcttcgtgatgtctgcattcaactcacagtgtggaacctttctttgatagttcaggtttgaaacactctttttgtagaaactgcaaggggataattgcacttctttgaggcctaccgtagtaaaggaaataacttcctatagaaagaagacagaagcattctcagaaccctcttcgtgatgtttgcattcaactcacagtgctgaacctttctttgatagttcagctttgaaacactcttcttgtagaaactgcaagtggatatttggtcctctctgaggatttcgttggaaacgggataaaccgcacagaactaaacagaagcattctcagagccctcttcgtgatgtttgcattcaactcacagtgctgaacctttctttgatagtgcagctttgaaacactctttttgtagaaactgcaagtggatgtttggtcctctctgaggatttcgttggaaacgggataaaccgcacagaactaaaacagaagcattgtcagaaacttctttgtgatgattgcattcaactcacagagttgaaggttccttttcaaacagcagtttccaatcactctttctgtggaatctgcaagtggatatttgggcctctctgaggatttcgttggaaacgggataaaacgcacagaactaaaacagaagcattctcagaaacttctctgtgatgtttgtgttcaactcccagagtttcacgttgcttttcatagagtagttctgaaacatgcttttcgtagtgtctgcaagtggacatttggagcgctttcaggcctgtggtggaaaacgaattatggtcacataaaaactggagagaagccttctcagaaacttctctgtgatgattgcattcaactcacagagttgaaccctcctatggatagagcagtgttgaaactctctttttgtggaatctgcaagtggatatgtggacctctccgaagatgtctttggaaacgggaatatcttcacataaaaactaaacagaagcattctcagaaacttcttggtgatgtttgcattcaaatcccagagttgaaccttcctttgatagttcaggtttgaaacactctttctgtaggatctgcaagtggctatttggaccactctgtggccttcgttcgaaacgggtatatcttcgcataaaatctagacagaagcattctcagaaaatactttgtgatgattgagtttaaatcacagagctgaccattcctttggatggagcaggtttgagacacactttttgtagaatctacaagtggatatttggacctctctgaggatttcgttggaaacgggataactgcacctaactaaacggaagcattctcagaaactgctttgtgatgattgcattcacctcacagagttgaacattcctattgatagagcagtttggaaacactcttgttgtggaatgtgcaagtggagatttggagcgctttgaggcctatggtagtaaagggaatagcttcatagaaaaactagacagatgcattctcaggaactttttggtgatgtttgtattcaactcccagagttgaactttcctttggaaagagcagctatgaaacactctttttctagaatctgcaagtggacgtttggagggctttgtggtttgtggtggaaaaggaaatatcttcacctaaatactagatagaagcattctcagaagcttctctgtgatgactgcattcaactcacggagttgaacactccttttgagagcgcagttttgaaactctctttctgtggcatccgcaaggggacatgtaggcctctttgaagatttcgttggaaacggaatcatcttcacataaaaactatacagaagcagtctcagaatcttctttgtgatgtttgcattcaaatcccagagttgaactttcctttcaaagttcacgtttgaaacagtctttttgcaggatctacaagtggatatttggaccactctgtgtccttcgttcgaaacgggtatatcttcacatgacatctagacagaagctttctcagaaaattctttgggatgattgagttgagcaaacagagctgaacactccttgcgatgtagcagtttagaaacacactttctgcagaatctgcaagtgcatatgtggacctctctgaggaaatcgttggaaacgggataatttcagctgactaaacagaagcagcattctcagaaccttcttcgtgatgtctgcattcaactcacagtgtggaacctttctttgatagttcaggtttgaaacactctttttgtagaaactgcaaggggataattgcacttctttgaggcctaccgtagtaaaggaaataacttcctatagaaagaagacagaagcattctcagaaccctcttcgtgatgtttgcattcaactcacagtgctgaacctttctttgatagttcagctttgaaacactcttcttgtagaaactgcaagtggatatttggtcctctctgaggatttcgttggaaacgggataaaccgcacagaactaaacagaagaattctcagagccctcttcgtgatgtttgcattcaactcacagtgctgaacctttctttgatagtgcagctttgaaacactctttttgtagaaactgcaagtggatatttggtcctctctgaggatttcgttggaaacgggataagccgcacagaactaaaacagaagcattgtcagaaacttctttgtgatgattgcattcaactcacagagttgaaggttccttttcaaacagcagtttccaatcactctttctggggaatctgcaagtggatatttgggcctctctgaggatttcgttggaaacgggataaaacgcacagaactaaaacagaagcattctcagaaacttctctgtgatgtttgtgttcaactcccagagtttcacgttgcttttcatagagtagttctgaaacatgcttttcgtagtgtctgcaagtggacatttggagcgctttcaggcctgtggtggaaaacgaattatggtcacataaaaactggagagaagccttctcagaaacttctctgtgatgattgcattcaactcacagagttgaaccctcctatggatagagcagtgttgaaactctctttttgtggaatctgcaagtggatatgtggacctctccgaggatgtctttggaaacgggaatatcttcacataaaaactaaacagaagcattctcagaaacttcttggtgatgtttgcattcaaatcccagagttgaaccttcctttgatagttcaggtttgaaacactctttttgtaggatctgcaagtggatgtttggaccattctgtggccttctttcgaaacgggtacatcttcgcataaaatctagacagaagcattctcagaaaatactttgtgatgattgagtttaaatcacagagctgaccattcctttggatggagcaggtttgagacacactttttgtagaatctacaagtggatatttggacctctctgaggatttcgttggaaacgggataactgcacctaactaaacggaagcattctcagaaactgctttgtgatgattgcattcacctcacagagttgaacattcctattgatagagcagtttggaaacactcttgttgtggaatgtgcaagtggagatttggagcgctttgaggcctatggtagtaaagggaatagcttcatagaaaaactagacagatgcattctcaggaaccttttggtgatgtttgtattcaactcccagagttgaactttcctttggaaagagcagctatgaaacactctttttctagaatctgcaagtggacgtttggagggctttgtggtttgtggtggaaaaggaaatatcttcacctaaatactagacagaagcattctcagaagcttctctgtgatgactgcattcaactcacggagttgaacactccttttgagagcgcagttttgaaactctctttctgtggcatctgcaaggggacatgtagacctctttgaagatttcgttggaaacggaatcatcttcacataaaaactatacagaagcagtctcagaatcttctttgtgatgtttgcattcaaatcccagagttgaactttcctttcaaagttcacgtttgaaacactctttttgcaggatctacaagtggatatttggaccactctgtgtccttcgttcgaaacgggtatatcttcacacgacatctagacagaagctttctcagaaaattctttgggatgattgagtggaactcacagagctgaacattccttgcgatgtagcagtttagaaacacactttctgcagaatctgcaagtgcatatttggacctctctgaggaattcgttggaaacgggataatttcagctgactaaacagaagcattctcagaaccttcttcgtgatgtctgcattcaactcacagtgtggaacctttctttgatagttcaggtttgaaacactctttttgtagaaactgcaaggggataattgcacttctttgaggcctaccgtagtaaaggaaataacttcctatagaaagaagacagaagcattctcagaaccctcttcgtgatgtttgcattcaactcacagtgctgaacctttctttgatagttcagctttgaaacactcttcttgtagaaactgcaagtggatatttggtcctctctgaggatttcgttggaaacgggataaaccgcacagaactaaacagaagaattctcagagccctcttcgtgatgtttgcattcaactcacagtgctgaacctttctttgatagtgcagctttgaaacactctttttgtagaaactgcaagtggatatttggtcctctctgaggatttcgttggaaacgggataaaccgcacagaactaaaacagaagcattcacagaaaactcttggtgacgactgagtttaactcacagagctgaacattcctttggatggagcagtttcgaaacacactatttgtagaatctgcaagtggatatttgggcctctctgaggatttcgttggaaacgggataaaacgcacagaactaaaacagaagcattctcagaaactactttgtgatgattgcattcaagtcacagagttgaacattccctttgacagagcagtttggaaactctctttgtgtagaatctgcaagtggagatatggaccgctttgaggcctatggtagtaaaggaaataccttcatataaaagctagacagtagcattctcagaaactactttgtgatgcttgcattcaactcacagagttgaactttcctttcgagagagaagctttgaaacactctttttccagaatgtgcaagtggacatttggggagctttgaggcctgtggtggaaaaggaattatcttcccgtaaaagctagatagaagcattgtcagaaacttctttgtgatgattgcattcaactcacagagttgaaggttccttttcaaacagcagtttccaatcactctttctgtggaatctgcaagtggatatttcgacctctttgaagatttcgttggaaacgggagaatcttcacagaaaagctaaacagaagcattctcagaaacttctctgtgatgtttgtgttcaactcccagagtttcacgttgcttttcatagagtagttctgaaacatgcttttcgtagtgtctgcaagtggacatttggagcgctttcaggcctgtggtggaaaacaaattatggtcacataaaaactggagagaagccttctcagaaacttctctgtgatgattgcattcaactcacagagttgaaccctcctatggatagagcagtgttgaaactctctttttgtggaatctgcaagtggatatgtggacctctccgaagatgtctttggaaacgggaatatcttcacataaaaactaaacagaagcattctcagaaacttcttggtgatgtttgcattcaaatcccagagttgaaccttcctttgatagttcaggtttgaaacactctttttgtaggatctgcaagtggctatttggaccactctgtggccttcgttcgaaacgggtatatcttcgcataaaatctagacagaagcattctcagaaaacactttgcgatgattgagtttaaatcacagagctgaacattcctttggatggagcaggtttgagacacactttttgtagaatctacaagtggatatttggacctctctgaggatttcgttggaaacgggataactgcacctaactaaacggaagcattctcagaaactgctttgtgatgattgcattcacctcacagagttgaacattcctattgatagagcagtttggaaacactcttgttgtggaatgtgcaagtggagatttggagcgctttgaggcctatggtagtaaagggaatagcttcatagaaaaactagacagatgcattctcaggaactttttggtgatgtttgtattcaactcccagagttgaactttcctttggaaagagcagctatgaaacactctttttctagaatctgcaagtggacgtttggagggctttgtggtttgtggtggaaaaggaaatatcttcacctaaatactagatagaagcattctcagaagcttctctgtgatgactgcattcaactcacggagttgaacactccttttgagagcgcagttttgaaactctctttctgtggcatctgcaaggggacatgtagacctctttgaagatttcgttggaaacggaatcatcttcacataaaaactatacagaagcagtctcagaatcttctttgtgatgtttgcattcaaatcccagagttgaactttcctttcaaagttcacgtttgaaacactctttttgcaggatctacaagtggatatttggaccactctgtgtccttcgttcgaaacgggtatatcttcacacgacatctagacagaagctttctcagaaaattcttagggatgattgagtggaactcacagagctgaacattccttgcgatgtagcagtttagaaacacactttctgcagaatctgcaagtgcatatttggacctctctgaggaattcgttggaaacgggataatttcagctgactaaacagaagcattctcagaaccttcttcgtgctgtctgcattcaactcacagtgtggaacctttctttgatagttcaggtttgaaacactctttttgtagaaactgcaaggggataattgcacttctttgaggcctaccgtagtaaaggaaataacttcctatagaaagaagacagaagcattctcagaaccctcttcgtgatgtttgcattcaactcacagtgctgaacctttctttgatagttcagctttgaaacactcttcttgtagaaactgcaagtggatatttggtcctctctgaggatttcgttggaaacgggataaaccgcacagaactaaacagaagaattctcagagccctcttcgtgatgtttgcattcaactcacagtgctgaacctttctttgatagtgcagctttgaaacactctttttgtagaaactgcaagtggatgtttggtcctctctgaggatttcgttggaaacgggataaaccgcacagaactaaaacagaagcattgtcagaaacttctttgtgatgattgcattcaactcacagagttgaaggttccttttcaaacagcagtttccaatcactctttctgtggaatctgcaagtggatatttgggcctctctgaggatttcgttggaaacgggataaaacgcacagaactaaaacagaagcattctcagaaacttctctgtgatgtttgtgttcaactcccagagtttcacgttgcttttcatagagtagttctgaaacatgcttttcgtagtgtctgcaagtggacatttggagcgctttcaggcctgtggtggaaaacgaattatggtcacataaaaactggagagaagccttctcagaaacttctctgtgatgattgcattcaactcacagagttgaaccctcctatggatagagcagtgttgaaactctctttttgtggaatctgcaagtggatatgtggacctctccgaagatgtctttggaaacgggaatatcttcacataaaaactaaacagaagcattctcagaaacttcttggtgatgtttgcattcaaatcccagagttgaaccttcctttgatagttcaggtttgaaacactctttctgtaggatctgcaagtggctatttggaccactctgtggccttcgttcgaaacgggtatatcttcgcataaaatctagacagaagcattctcagaaaatactttgtgatgattgagtttaaatcacagagctgaccattcctttggatggagcaggtttgagacacactttttgtagaatctacaagtggatatttggacctctctgaggatttcgttggaaacgggataactgcacctaactaaacggaagcattctcagaaactgctttgtgatgattgcattcacctcacagagttgaacattcctattgatagagcagtttggaaacactcttgttgtggaatgtgcaagtggagatttggagcgctttgaggcctatggtagtaaagggaatagcttcatagaaaaactagacagatgcattctcaggaactttttggtgatgtttgtattcaactcccagagttgaactttcctttggaaagagcagctatgaaacactctttttctagaatctgcaagtggacgtttggagggctttgtggtttgtggtggaaaaggaaatatcttcacctaaatactagatagaagcattctcagaagcttctctgtgatgactgcattcaactcacggagttgaacactccttttgagagcgcagttttgaaactctctttctgtggcatctgcaaggggacatgtagacctctttgaagatttcgttggaaacggaatcatcttcacataaaaactatacagaagcagtctcagaatcttctttgtgatgtttgcattcaaatcccagagttgaactttcctttcaaagttcacgtttgaaacactctttttgcaggatctacaagtggatatttggaccactctgtgtccttcgttcgaaacgggtatatcttcacacgacatctagacagaagctttctcagaaaattctttgggatgattgagtggaactcacagagctgaacattccttgcgatgtagcagtttagaaacacactttctgcagaatctgcaagtgcatatttggacctctctgaggaattcgttggaaacgggataatttcagctgactaaacagaagcattctcagaaccttcttcgtgatgtctgcattcaactcacagtgtggaacctttctttgatagttcaggtttgaaacactctttttgtagaaactgcaaggggataattgcacttctttgaggcctaccgtagtaaaggaaataacttcctatagaaagaagacagaagcattctcagaaccctcttcgtgatgtttgcattcaactcacagtgctgaacctttctttgatagttcagctttgaaacactcttcttgtagaaactgcaagtggatatttggtcctctctgaggatttcgttggaaacgggataaaccgcacagaactaaacagaagcattctcagaaccttcttcgtgatgtttgcattcaactcacagtgttgaacctttctttgatagttcaggtttgaaacggtctttgtgtagagactgcaagtagatatttggacctctctgaggatttcgttggaaacgggataaaccgcacagaactaaaacagaagcattcacagaaaactcttggtgacgactgagtttaactcacagagctgaacattcctttggatggagcagtttcgaaacacactatttgtagaatgtgcaagtggatatgtgggcctctctgaggatttcgttggaaacgggataaaccgcacagaactaaacagaagcattctcagaaactactttgtgatgattgcattcaagtcacagagttgaacattccctttgacagagcagtttggaaactctctttgtgtagaatctgcaagtggagatatggaccgctttgaggcctatggtagtaaaggaaatagcttcatataaaagctagacagtagcattctgagaaacttctttgtgatgcttgcattcaactcacagagttgaactttcctttcgagagagaagctttgaaacactctttttccagaatctgcaagtggacatttggagggctttgaggcctgtggtggaaaaggaattatcttcccgtaaaagctagatagaagcattgtcagaaacttctttgtgatgattgcattcaagtcacagagttgaaggttccttttcaaagagcagtttccaatcactctttctgtggaatctgcaagtggatatttggacctctttgaagatttcgttggaaacgggagaatcttcacagaaaagctaaacagaagcattctcagaaacttctctgtgatgtttgggttcaactcccagagtttcacattgcttttcatagagtagttctgaaacatgcttttcgtagtgtctgcaagtggacatttggagcgctttcaggcctgtggtggaaaacgaattatggtcacataaaaactggagagaagccttctcagaaacttctctgtgatgattgcattcaactcacagagttgaaccctcctatggatagagcagtgttgaaactgtctttttgtggaatctgcaagtggatatgtggacctctccgaagatgtctttggaaacgggaatatcttcacataaaaactaaacagaagcattctcagaaacttcttggtgatgtttgcattcaaatcccagagttgaaccttcctttgagagttcaggtttgaaacactctttttgtaggatctgcaagtggatatttggaccactctgtggccttcgttcgaaacgggtacatcttcgcataaaatctagacagaagcattctcagaaccttcttcgtgatgtttgcattcaactcacagtgctgaacctttctttgatagttcagcattgaaacactctttttgtagaaactgcaagtggatatttcgtcctctctgaggatttcgttggaaacgggataaaccgcacagaactaaacagaagcattctcagaacattcttcgtgatgtttgcattcaactcacagtgctgaaactttctttgatagttcagctttgaaacactctttttgtagaaactgcaagtggatatttggtcctctctgaggatttcgttggaaacgggataaaccgcgcagaactaaacagaagcattctcagaaccttcttcgtgatgtttgcattcaactcacagtgttgaacctttctttgatagttcaggtttgaaacggtctttctgtagaaactgcaagtagatatttggacctctctgaggatttcgttggaaacgggataacccgcacagaactaaaacagaagcattcacagaaaactcttggtgacgactgagtttaactcacagagctgaacattcctttggatggagcagtttcgaaacacactatttgtagaatgtgcaagtggatatttaggcctctctgaggatttcgttggaaacgggataaaccgcacagaactaaacagaagcattctcagaaactactttgtgatgattgcattcaagtcacagagttgaacattccctttgacagagcagtttggaaactctctttgtgtagaatctgcaagtggagatatggaccgctttgaggcctatggtagtaaaggaaatagcttcatataaaagctagacagtagcattctcagaaacttctttgtgatgcttgcattcaactcacagagttgaactttcctttcgagagagaagctttgaaacactctttttccagaatctggaagtggacatttggagggctttgaggcctgtggtggaaaaggaattatcttcccgtaaaagctagatagaagcattgtcagaaacttctttgtgatgattgcattcaactcagagttgaaggttccttttcaaagagcagtttccaatcactctttctgtggaatctgcaagtggatatttcgacctattttgaagatttcgttggaaacgggataatcttcacagaaaagctaaacagaagcattctcagcaaacttctctgtgatgtttgtgttcaactcccagagtttcacattgcttttcatagagtagttctgaaacatgcttttcgtagtgtctacaagtggacatttggagcgctttcaggcctgtggtggaaaacgaattatggtcacataaaaactggagagaagccttctcagaaacttctctgtgatgattgcattcaactcacagatttgaaccctcctatggatagagcattgttgaaactctctttttgtggaatctgcaagtggatatgtgcacctctccgaagatgtctttggaaacgggaatatcttcacataaaaactaaacagaagcattctcagaaacttcttggtgatgtttgcattcaaatcccagagttgaaccttcctttgatagttcaggtttgaaacactctttttgtaggatctgcaagtggctatttggaccactctgtggccttcgttcgaaactggtatatcttcgcataaaatctagacagaagcattctcagaaaatactttgtgatgattgagtttaaatcacagagctgaccattcctttggatggagcaggtttgagacacactttttgtagaatctacaagtggatatttggacctctctgaggatttcgttggaaacgggataactgcacctaactaaacggaagcattctcagaaactgctttgtgatgattgcattcacctcacagagttgaacattcctattgatagagcagtttggaaacactcttgttgtggaatgtgcaagtggagatttggagcgctttgaggcctatggtagtaaagggaatagcttcatagaaaaactagacagatgcattctcaggaactttttggtgatgtttgtattcaactcccagagttgaactttcctttggaaagagcagctatgaaacactctttttctagaatctgcaagtggacgtttggagggctttgtggtttgtggtggaaaaggaaatatcttcacctaaatactagatagaagcattctcagaagcttctctgtgatgactgcattcaactcacggagttgaacactccttttgagagcgcagttttgaaactctctttctgtggcatctgcaaggggacatgtagacctctttgaagatttcgttggaaacggaatcatcttcacataaaaactatacagaagcagtctcagaatcttctttgtgatgtttgcattcaaatcccagagttgaactttcctttcaaagttcacgtttgaaacactctttttgcaggatctacaagtggatatttggaccactctgtgtccttcgttcgaaacgggtatatcttcacacgacatctagacagaagctttctcagaaaattctttgggatgattgagtggaactcacagagctgaacattccttgcgatgtagcagtttagaaacacactttctgcagaatctgcaagtgcatatttggacctctctgaggaattcgttggaaacgggataatttcagctgactaaacagaagcattctcagaaccttcttcgtgatgtctgcattcaactcacagtgtggaacctttctttgatagttcaggtttgaaacactctttttgtagaaactgcaaggggataattgcacttctttgaggcctaccgtagtaaaggaaataacttcctatagaaagaagacagaagcattctcagaaccctcttcgtgatgtttgcattcaactcacagtgctgaacctttctttgatagttcagctttgaaacactcttcttgtagaaactgcaagtggatatttggtcctctctgaggatttcgttggaaacgggataaaccgcacagaactaaacagaagaattctcagagccctcttcgtgatgtttgcattcaactcacagtgctgaacctttctttgatagtgcagctttgaaacactctttttgtagaaactgcaagtggatgtttggtcctctctgaggatttcgttggaaacgggataaaccgcacagaactaaaacagaagcattgtcagaaacttctttgtgatgattgcattcaactcacagagttgaaggttccttttcaaacagcagtttccaatcactctttctgtggaatctgcaagtggatatttgggcctctctgaggatttcgttggaaacgggataaaacgcacagaactaaaacagaagcattctcagaaacttctctgtgatgtttgtgttcaactcccagagtttcacgttgcttttcatagagtagttctgaaacatgcttttcgtagtgtctgcaagtggacatttggagcgctttcaggcctgtggtggaaaacgaattatggtcacataaaaactggagagaagccttctcagaaacttctctgtgatgattgcattcaactcacagagttgaaccctcctatggatagagcagtgttgaaactctctttttgtggaatctgcaagtggatatgtggacctctccgaagatgtctttggaaacgggaatatcttcacataaaaactaaacagaagcattctcagaaacttcttggtgatgtttgcattcaaatcccagagttgaaccttcctttgatagttcaggtttgaaacactctttctgtaggatctgcaagtggctatttggaccactctgtggccttcgttcgaaacgggtatatcttcgcataaaatctagacagaagcattctcagaaaatactttgtgatgattgagtttaaatcacagagctgaccattcctttggatggagcaggtttgagacacactttttgtagaatctacaagtggatatttggacctctctgaggatttcgttggaaacgggataactgcacctaactaaacggaagcattctcagaaactgctttgtgatgattgcattcacctcacagagttgaacattcctattgatagagcagtttggaaacactcttgttgtggaatgtgcaagtggagatttggagcgctttgaggcctgtggtagtaaagggaatagcttcatagaaaaactagacagatgcattctcaggaactttttggtgatgtttgtattcaactcccagagttgaactttcctttggaaagagcagctatgaaacactctttttctagaatctgcaagtggacgtttggagggctttgtggtttgtggtggaaaaggaaatatcttcacctaaatactagatagaagcattctcagaagcttctctgtgatgactgcattcaactcacggagttgaacactccttttgagagtgcagttttgaaactctctttctgtggcatctgcaaggggacatgtagacctctttgaagatttcgttggaaacggaatcatcttcacataaaaactatacagaagcagtctcagaatcttctttgtgatgttttcattcaaatcccagagttgaactttccttccaaagttcaggtttgaaacactctttttgcaggatctacaagtggatatttggaccactctgtgtccttcgttcgaaacgggtatatcttcacatgatatctagacagaagctttctcagaaaattctttgggatgattgagttgaactcacagagctgaacattccttgcgatggagcagtttagaaacacactttctgcagaatctgcaagtgcatatttggacgtctctgaggaattcgttggaaacgggataatttcagctgactaaacagaagcattctcagaaccttcttcgtgatgtctgcattcaactctcagtgtggaacctttctttgatagttcaggtttgaaacactctttttgtagaaactgcaaggggataattgcacttctttgatccctaccgcagtaaaggaaataacttcctataaaaagaagacagaagcattctcagaaccctcttcgtgatgtttgcattcaactcacagtgctgaacctttctttgatagttcagctttgaaacactctttttgtagaaactgcaagtggatattttgtcctctctgagcatttcgttggaaacgggataaactgcacagaactaaacagaagcattctcagaaccttcttcgtgatgtttgcattcaactcacagtgttgaacctttctttgatagttcaggtttgaaacggtctttctgtagaaactgcaagtagatatttggacctctctgaggatttcgttggaaacgggataacccacacagaactaaaacagaagcattcacagaaaactcttggtgacgactgagtttaactcacagagctgaacattcctttggatggagcagtttcgaaacacactatttgtagaatgtgcaagtggatatttaggcctctctgaggatttcgttggaaacgggataaaccgcacagaactaaacagaagcattctcagaaactactttgtgatgattgcattcaagtcacagagttgaacattccctttgacagagcagtttggaaactctctttgtgtagaatctgcaagtggagatatggaccgctttgaggcctatggtagtaaaggaaatagcttcatataaaagctagacagtagcattctcagaaacttctttgtgatgcttgcattcaactcacagagttgaactttcctttcgagagagaagctttgaaacactctttttccagaatctgcaagtggacatttggagggctttgaggcctgtggtggaaaaggaattatcttcccgtaaaagctagatagaagcattgtcagaaacttctttgtgatgattgcattcaagtcacagagttgaaggttccttttcaaagagcagtttccaatcactctttctgtggaatctgcaagtggatatttggacctctttgaagatttcgttggaaacgggagaatcttcacagaaaagctaaacagaagcattctcagaagcttctctgtgatgtttgtgttcaactcccagagtttcacattgcttctcatagagtagttctgaaacatgcttttcgtagtgtctgcaagtggacatttggagcgctttcaggcctgtggtggaaaacgaattatggtcacataaaaactggagagaagccttctcagaaacttctctgtgatgattgcattcaactcacagagttgaaccctcctatggatagagcagtgttgaaactctctttttgtggaatctgcaagcggatatgtggacctctccgaagatgtctttggaaacgggaatatcttcacataaaaactaaacagaagcattctcagaaacttcttggtgatgtttgcattcaaatcccagagttgaaccttcctttgatagttcaggtttgaaacactctttttgtaggatctgcaagtggatatttggaccactctgtggccttcgttcgaaacgggtacatcttcgcataaaatctagacagaagcattctcagaaaatactttgtgatgattgagttgaactcacagagctgaacattcctttggatggagcaggtttgagacacactttttgtagaatctacaagtggatatttggacctctctgaggatttcgttggaaacgggataactgcacctaactaaacggaagcattctcagaaactgctttgtgatgattgcattcacctcacagagttgaacattcctattgatagagcagtttggaaacactcttgttgtggaatgtgcaagtggagatttggagcgctttgaggcctatggtagtaaagggaatagcttcatagaaaaactagacagatgcattctcaggaactttttggtgatgtttgtattcaactcccagagttgaactttcctttggaaagagcagctatgaaacactgtttttctagaatctgcaagtggacgtttggagggctttgtggtttgtggtggaaaaggaaatatcttcacctaaatactagatagaagcattctcagaagcttctctgtgatgactgcattcaactcacggagttgaacactccttttgagagcgcagttttgaaactctctttctgtggcatccgcaaggggacatgtagacctctttgaagatttcgttggaaacggaatcatcttcacataaaaactatacagaagcagtctcagaatcttctttgtgatgtttgcattcaaatcccagagttgaactttcctttccaagttcacgtttgaaacactctttttgcaggatctacaagtggatatttggaccactctgtgtccttcgttcgaaacgggtatatcttcacatgacatctagacagaagctttctcagaaaattctttgggatgattgagtggaactcacagagctgaacattccttgcgatgtagcagtttagaaacacactttctgcagaatctgcaagtgcatatttggacctctctgaggaattcgttggaaacgggataatttcagctgactaaacagaagcattctcagaaccttcttcgtgatgtctgcattcaacgcacagtgtggaacctttctttgatagttcaggtttgaaacactctttttgtagaaactgcaaggggataattgcacttctttgaggcctaccgtagtaaaggaaataacttcctatagaaagaagacagaagcattctcagaaccctcttcgtgatgtttgcattcaactcacagtgctgaatctttctttgatagttcagctttgaaacactcttcttgtagaaactgcaagtggatatttggtcctctctgaggatttcgttggaaacgggataaaccgcacagaactaaacagaagcattctcagaaccttcttcgtgatgtttgcattcaactcacagtgttgaacctttctttgatagttcaggtttgaaacggtctttctgtagaaactgcaagtagatatttggacctctctgaggatttcgttggaaacgggataacccgcacagaactaaaacagaagcattcacagaaaactcttggtgacgactgagtttaactcacagagctgaacattcctttggatggagcagtttcgaaacacactatttgtagaatgtgcaagtggatatttgggcctctctgaggatttcgttggaaacgggataaaccgcacagaaataaacagaagcattctcagaaactactttgtgatgattgcattcaagtcacagagttgaacattccctttgacagagcagtttggaaactctctttctgtagaatctgcaagtggagatatggaccgctttgaggcctatggtagtaaaggaaatagcttcatataaaagctagacagtagcattctcagaaacttctttgtgatgcttgcattcaactcacagagttgaactttcctttcgagagagaagctttgaaacactctttttccagaatctgcaagtggacatttggagggctttgaggcctgtggtggaaaaggaattaacttcccgtaaaagctagatagaagcattgtcagaaacttctttgtgatgattgcattcaactcacagagatgaaggttcctttacaaacagcagtttccaaacactctttctgtggaatctgcaagtggatatttggacctctttgaagatttcgttggaaacgggagaatcttcacagaaaagctaaacagaagcattctcagaaacttctctgtgatgtttgtgttcaactcccagagtttcacattgcttttcatagagtagttctgaaacatgcttttcgtagtgtctgcaagtggacatttggagcgctttcaggcctgtggtggaaaacgaattatggtcccataaaaactggagagaagccttctcagaaacttctctgtgatgattgcattcaactcacagatttgaaccctcctatggatagagcattcttgaaactctctttttgtggaatctgcaagtggatatgtggacctctccgaagatgtctttggaaacgggaatatcttcacataaaaacaaaacagaagcattctcagaaacttcttggtgatgtttgcattcaaatcccagagttgaaccttcctgtgatagttcaggtttgaaacactctttttgtaggatctgcaagtggatatttggaccactctgtggccttcgttcgaaacgggtacatcttcacataaaatctagacagaagcattctcagaaaatactttgtgatgattgagtttaactcacagagctgaacattcctttggatggagcaggtttgagacacactttttgtagaatctacaagtggatattgggacctctctgaggatttcgttggaaacgcgataactgcacctaactaaacggaagcattctcagaaactgctttgtgatgattgcattcacctcacagagttgaacattcctattgatagagcagtttggaaacactcttgttgtggaatgtgcaagtggagatttggagcgctttgaggcctatggtagtaaagggaatagcttcatagaaaaactagacagatgcattctcaggaactttttggtgatgtttgtattcaactcccagagttgaactttcctttggaaagagcatctatgaaacactgtttttctagaatctgcaagtggacgtttggagggctttgtggtttgtggtggaaaaggaaatatcttcacctaaatactagatagaagcattctcagaagcttctctgtgatgactgcattgaactcacggagttgaacactccttttgggagcgcagttttgaaactctctttctgtggcatctgcaaggggacatgtagacctctttgaagatttcgttggaaacggaatcatcttcacataaaaactatacagaagcagtctcagaatcttctttgtgatgtttgcattcaaatcccagagttgaactttcctttcaaagttcacgtttgaaacactctttttgcaggatctacaagtggatatttggaccactctgtgtccttcgttcgaaacgggtatatcttcacacgacatctagacagaagctttctcagaaaattctttgggatgattgagtggaactcacagagctgaacattccttgcgatgtagcagtttagaaacacactttctgcagaatctgcaagtgcatatttggacctctctgaggaattcgttggaaacgggataatttcagctgactaaacagaagcattctcagaaccttcttcgtgatgtctgcattcaactcacagtgtggaacctttctttgatagttcaggtttgaaacactctttttgtagaaactgcaaggggataattgcacttctttgaggcctaccgtagtaaaggaaataacttcctatagaaagaagacagaagcattctcagaaccctcttcgtgatgtttgcattcaactcacagtgctgaacctttctttgatagttcagctttgaaacactcttcttgtagaaactgcaagtggatatttggtcctctctgaggatttcgttggaaacgggataaaccgcacagaactaaacagaagcattctcagagccctcttcgtgatgtttgcattcaactcacagtgctgaacctttctttgatagtgcagctttgaaacactctttttgtagaaactgcaagtggatgtttggtcctctctgaggatttcgttggaaacgggataaaccgcacagaactaaaacagaagcattgtcagaaacttctttgtgatgattgcattcaactcacagagttgaaggttccttttcaaacagcagtttccaatcactctttctgtggaatctgcaagtggatatttgggcctctctgaggatttcgttggaaacgggataaaacgcacagaactaaaacagaagcattctcagaaacttctctgtgatgtttgtgttcaactcccagagtttcacgttgcttttcatagagtagttctgaaacatgcttttcgtagtgtctgcaagtggacatttggagcgctttcaggcctgtggtggaaaacgaattatggtcacataaaaactggagagaagccttctcagaaacttctctgtgatgattgcattcaactcacagagttgaaccctcctatggatagagcagtgttgaaactctctttttgtggaacctgcaagtggatatgtggacctctccgaagatgtctttggaaacgggaatatcttcacataaaaactaaacagaagcattctcagaaacttcttggtgatgtttgcattcaaatcccagagttgaaccttcctttgatagttcaggtttgaaacactctttctgtaggatctgcaagtggctatttggaccactctgtggccttcgttcgaaacgggtatatcttcgcataaaatctagacagaagcattctcagaaaatactttgtgatgattgagtttaaatcacagagctgaccattcctttggatggagcaggtttgagacacactttttgtagaatctacaagtggatatttggacctctctgaggatttcgttggaaacgggataactgcacctaactaaacggaagcattctcagaaactgctttgtgatgattgcattcacctcacagagttgaacattcctattgatagagcagtttggaaacactcttgttgtggaatgtgcaagtggagatttggagcgctttgaggcctatggtagtaaagggaatagcttcatagaaaaactagacagatgcattctcaggaactttttggtgatgtttgtattcaactcccagagttgaactttcctttggaaagagcagctatgaaacactctttttctagaatctgcaagtggacgtttggagggctttgtggtttgtggtggaaaaggaaatatcttcacctaaatactagatagaagcattctcagaagcttctctgtgatgactgcattcaactcacggagttgaacactccttttgagagcgcagttttgaaactctctttctgtggcatctgcaaggggacatgtagacctctttgaagatttcgttggaaacggaatcatcttcacataaaaactatacagaagcagtctcagaatcttctttgtgatgtttgcattcaaatcccagagttgaactttcctttcaaagttcacgtttgaaacactctttttgcaggatctacaagtggatatttggaccactctgtgtccttcgttcgaaacgggtatatcttcacacgacatctagacagaagctttctcagaaaattctttgggatgattgagtggaactcacagagctgaacattccttgcgatgtagcagtttagaaacacactttctgcagaatctgcaagtgcatatttggacctctctgaggaattcgttggaaacgggataatttcagctgactaaacagaagcattctcagaacttcttcgtgatgtctgcattcaactcacagtgtggaacctttctttgatagttcaggtttgaaacactctttttgtagaaactgcaaggggataattgcacttctttgaggcctaccgtagtaaaggaaataacttcctatagaaagaagacagaagcattctcagaaccctcttcgtgatgtttgcattcaactcacagtgctgaacctttctttgatagttcagctttgaaacactcttcttgtagaaactgcaagtggatatttggtcctctctgaggatttcgttggaaacgggataaaccgcacagaactaaacagaagcattctcagaaccttcttcgtgatgtttgcattcaactcacagtgttgaacctttctttgatagttcaggtttgaaacggtctttctgtagaaactgcaagtagatatttggacctctctgaggatttcattggaaacgggataaaccgcacagaactaaaacagaagcattctcagaaaactctttgtgacgactgagtttaactcacagggctgaacattcctttggatggagcagtttcgaaacacactacttgtagaatctgccagtggatatttgggcctctctgaggatttcgctggaaacgggataaaccgcacagaaataaacagaagcattctcagaaacttctctgtgatgtttgtgttcaactcccagagtttcacgttgcttttcatagagtagttctgaaacatgcttttcgtagtgtctgcaagtggacatttggagcgctttcaggcctgtggtggaaaacgaattatggtcacataaaaactggagagaagccttctcagaaacttctctgtgatgattgcattcaactcacagagttgaaccctcctatggatagagcagtgttgaaactctctttttgtggaatctgcaagtggatatgtggacctctccgaagatgtctttggaaacgggaatatcttcacataaaaactaaacagaagcattctcagaaacttcttggtgatgtttgcattcaaatcccagagttgaaccttcctttgatagttcaggtttgaaacactctttctgtaggatctgcaagtggctatttggaccactctgtggccttcgttcgaaacgggtatatcttcgcataaaatctagacagaagcattctcagaaaatactttgtgatgattgagtttaaatcacagagctgaccattcctttggatggagcaggtttgagacacactttttgtagaatctacaagtggatatttggacctctctgaggatttcgttggaaacgggataactgcacctaactaaacggaagcattctcagaaactgctttgtgatgattgcattcacctcacagagttgaacattcctattgatagagcagtttggaaacactcttgttgtggaatgtgcaagtggagatttggagcgctttgaggcctgtggtagtaaagggaatagcttcatagaaaaactagacagatgcattctcaggaactttttggtgatgtttgtattcaactcccagagttgaactttcctttggaaagagcagctatgaaacactctttttctagaatctgcaagtggacgtttggagggctttgtggtttgtggtggaaaaggaaatatcttcacctaaatactagatagaagcattctcagaagcttctctgtgatgactgcattcaactcacggagttgaacactccttttgagagcgcagttttgaaactctctttctgtggcatctgcaaggggacatgtagacctctttgaagatttcgttggaaacggaatcatcttcacataaaaactatacagaagcagtctcagaatcttctttgtgatgtttgcattcaaatcccagagttgaactttcctttcaaagttcacgtttgaaacactctttttgcaggatctacaagtggatatttggaccactctgtgtccttcgttcgaaacgggtatatcttcacacgacatctagacagaagctttctcagaaaattctttgggatgattgagtggaactcacagagctgaacattccttgcgatgtagcagtttagaaacacactttctgcagaatctgcaagtgcatatttggacctctctgaggaattcgttggaaacgggataatttcagctgactaaacagaagcattctcagaaccttcttcgtgatgtctgcattcaactcacagtgtggaacctttctttgatagttcaggtttgaaacactctttttgtagaaactgcaaggggataattgcacttctttgaggcctaccgtagtaaaggaaataacttcctatagaaagaagacagaagcattctcagaaccctcttcgtgatgtttgcattcaactcacagtgctgaacctttctttgatagttcagctttgaaacactcttcttgtagaaactgcaagtggatatttggtcctctctgaggatttcgttggaaacgggataaaccgcacagaactaaacagaagaattctcagagccctcttcgtgatgtttgcattcaactcacagtgctgaacctttctttgatagtgcagctttgaaacactctttttgtagaaactgcaagtggatgtttggtcctctctgaggatttcgttggaaacgggataaaccgcacagaactaaaacagaagcattgtcagaaacttctttgtgatgattgcattcaactcacagtagttgaaggttccttttcaaacagcagtttccaatcactctttctgtggaatctgcaagtggatatttgggcctctctgaggatttcgttggaaacgggataaaacgcacagaactaaaacagaagcattctcagaaacttctctgtgatgtttgtgttcaactcccagagtttcacgttgcttttcatagagtagttctgaaacatgcttttcgtagtgtctgcaagtggacatttggagcgctttcaggcctgtggtggaaaacgaattatggtcacataaaaactggagagaagccttctcagaaacttctctgtgatgattgcattcaactcacagagttgaaccctcctatggatagagcagtgttgaaactctctttttgtggaatctgcaagtggatatgtggacctctccgaagatgtctttggaaacgggaatatcttcacataaaaactaaacagaagcattctcagaaacttcttggtgatgtttgcattcaaatcccagagttgaaccgtcctttgatagttcaggtttgaaacactctttttgtaggatctgcaagtggctatttggaccactctgtggccttcgttcgaaacgggtatatcttcgcataaaatctagacagaagcattctcagaaaatactttgtgatgattgagtttaaatcacagagctgaccattcctttggatggagcaggtttgagacacactttttgtagaatctacaagtggatatttggacctctctgaggatttcgttggaaacgggataactgcacctaactaaacggaagcattctcagaaactgctttgtgatgattgcattcacctcacagagttgaacattcctattgatagagcagtttggaaacactcttgttgtggaatgtgcaagtggagatttggagcgctttgaggcctatggtagtaaagggaatagcttcatagaaaaactagacagatgcattctcaggaactttttggtgatgtttgtattcaactcccagagttgaactttcctttggaaagagcagctatgaaacactctttttctagaatctgcaagtggacgtttggagggctttgtggtttgtggtggaaaaggaaatatcttcacctaaatactagatagaagcattctcagaagcttctctgtgatgactgcattcaactcacggagttgaacactccttttgagagcgcagttttgaaactctctttctgtggcatctgcaaggggacatgtagacctctttgaagatttcgttggaaacggaatcatcttcacataaaaactatacagaagcagtctcagaatcttctttgtgatgtttgcattcaaatcccagagttgaactttcctttcaaagttcacgtttgaaacactctttttgcaggatctacaagtggatatttggaccactctgtgtccttcgttcgaaacgggtatatcttcacacgacatctagacagaagctttctcagaaaattctttgggatgattgagtggaactcacagagctgaacattccttgcgatgtagcagtttagaaacacactttctgcagaatctgcaagtgcatatttggacctctctgaggaattcgttggaaacgggataatttcagctgactaaacagaagcattctcagaaccttcttcgtgatgtctgcattcaactcacagtgtggaacctttctttgatagttcaggtttgaaacactctttttgtagaaactgcaaggggataattgcacttctttgaggcctaccgtagtaaaggaaataacttcctatagaaagaagacagaagcattctcagaaccctcttcgtgatgtttgcattcaactcacagtgctgaatctttctttgatagttcagctttgaaacactcttcttgtagaaactgcaagtggatatttggtcctctctgaggatttcgttggaaatgggataaaccgcacagaactaaacagaagaattctcaggagccctcttcgtgatgtttgcattcaactcacagtgctgaacctttctttgatagtgcagctttgaaacactctttttgtagaaactgcaagtggatgtttggtcctctctgaggatttcgttggaaacgggataaaccgcacagaactaaaacagaagcattctcagaaccttcttcgtgatgtttgcattcaactcacagtgttgaacctttctttgatagttcaggtttgaaacggtctttctgtagaaactgcaagtagatatttggacctctctgaggatttcgttggaaacgggataacccgcacagaactaaaacagaagcattcacagaaaactcttggtgacgactgagtttaactcacagagctgaacattcctttggatggagcagtttcgaaacacactatttgtagaatgtgcaagtggatatttaggcctctctgaggatttcgttggaaacgggataaaccgcacagaactaaacagaagcattctcagaaactactttgtgatgattgcattcaagtcacagagttgaacattccctttgacagagcagtttggaaactctctttgtgtagaatctgcaagtggagatatggaccgctttgaggcctatggtagtaaaggaaatagcttcatataaaagctagacagtagcattctcagaaacttctttgtgatgcttgcattcaactcacagagttgaactttcctttcgagagagaagctttgaaacactctttttccagaatctgcaagtggacatttggagggctttgaggcctgtggtggaaaaggaattatcttcccgtaaaagctagatagaagcattgtcagaaacttctttgtgatgattgcattcaactcacagagatgaaggttcctttacaaacagcagtttccaaacactctttctgtggaatctgcaagtggatatttggacctctttgaagatttcattggaaacgggagaatcttcacagaaaagctaaacagaagcattctcagaaacttctctgtgatgtttgtgttcaactcccagagtttcacattgcttttcatagagtagttctgaaacatgcttttcgtagtgtctgcaagtggacatttggagcgctttcaggcctgtggtggaaaacgaattatggtcccataaaaactggagagaagccttctcagaaacttctctgtgatgattgcattcaactcacagagttgaaccctcctatggatagagcagtgttgaaactctctttttgtggaatctgcaagtggatatgtggacctctccgaagatgtctttggaaacgggaatatcttcacataaaaactaaacagaagcattctcagaaacttcttggtgatgtttgcattcaaatcccagagttgaaccttcctgtgatagttcaggtttgaaacactctttttgtaggatctgcaagtggatatttggaccactctgtggccttcgttcgaaacgggtacatcttcacataaaatctagacagaagcattctcagaaaatactttgtgatgattgagtttaactcacagagctgaacattcctttggatggagcaggtttgagacacaccttttgtagaatctacaagtggatatttggacctctctgaggatttcgttggaaacgggataactgcacctaactaaacggaagcattctcagaaactgctttgtgatgactgcattcacctcacagagttgaacattcctattgatagagcagtttggaaacactcttgttgtggaatgtgcaagtggagatttggagcgctttgaggcctatggtagtaaagggaatagcttcatagaaaaactagacagatgcattctcaggaactttttggtgatgtttgtattcaactcccagagttgaactttcctttggaaagagcagctatgaaacactctttttctagaatctgcaagtggacgtttggagggctttgtggtttgtggtggaaaaggaaatatcttcacctaaatactagatagaagcattctcagaagcttctctgtgatgactgcattcaactcacggagttgaacactccttttgagagcgcagttttggaactctctttctgtggcatctgcaaggggacatgtagacctctttgaagatttcgttggaaacggaatcatcttcacataaaaactatacagaagcagtctcagaatcttctttgtgatgtttgcattcaaatcccagagttgaactttcctttcaaagttcacgtttgaaacactctttttgcaggatctacaagtggatatttggaccactctgtgtccttcgttcgaaacgggtatatcttcacatgacatctagacagaagctttctcagaaaattctttgggatgattgagttgagcaaacagagctgaacactccttgcgatgtagcagtttagaaacaccctttctgcagaatctgcaagtgcatatgtggacctctctgaggaattcgttggaaacgggataatttcagctgactaaacagaagcattctcagaaccttcttcgtgatgtctgcattcaactcacagtgtggaacttttctttgatagttcaggtttgaaacactctttttgtagaaactgcaaggggatcattgcacttctttgaggcctaccgtagtaaaggaaataacttcctataaaaagaagacagaagcattctcagaaccctcttcgtgatgtttgcattcaactcacagtgctgaacctttctttgatagttcagctttgaaacactcttcttgtagaaactgcaagtggatatttggtcctctctgaggatttcgttggaaacgggataaaccgcacagaactaaacagaagaattctcagagccctcttcgtgatgtttgcattcaactcacagtgctgaacctttctttgatagtgcagctttgaaacactctttttgtagaaactgcaagtggatgtttggtcctctctgaggatttcgttggaaacgggataaaccgcacagaactaaaacagaagcattgtcagaaacttctttgtgatgattgcattcaactcacagagttgaaggttccttttcaaacagcagtttccaatcactctttctgtggaatctgcaagtggatatttgggcctctctgaggatttcgttggaaacgggataaaacgcacagaactaaaacagaagcattctcagaaacttctctgtgatgtttgtgtgcaactcccagagtttcacattgcttctcatagagtagttctgaaacatgcttttcgtagtgtctgcaagtggacatttggagcgctttcaggcctgtggtggaaaacgaattatggtcacataaaaactggagagaagccttctcagaaacttctccgtgatgattgcattcaactcacagagttgaaccctcctatggatagagcagtgttgaaactctctttttgtggaatctgcaagtggatatgtggacctctccgaagatgtctttggaaacgggaatatcttcacataaaaactaaacagaagcattctcagaaacttcttggtgatgtttgcattcaaatcccagagttgaaccttcctttgatagttcaggtttgaaacactctttttgtaggatctgcaagtggatatttggaccactctgtggccttcgttcgaaacgggtatatcttcgcataaaatctagacagaagcattctcagaaaatactttgtgatgattgagtttaaatcacagagctgaccattcctttggatggagcaggtttgagacacactttttgtagaatctacaagtggatatttggacctctctgaggatttcgttggaaacgggataactgcacctaactaaacggaagcattctcagaaactgctttgtgatgattgcattcacctcacagagttgaacattcctattgatagagcagtttggaaacactcttgttgtggaatgtgcaagtggagatttggagcgctttgaggtctatggtagtaaagggaatagcttcatagaaaaactagacagatgcattctcaggaactttttggtgatgtttgtattcaactcccagagttgaactttcctttggaaagagcagctatgaaacactctttttctagaatctgcaagtggacgtttggagggctttgtggtttgtggtggaaaaggaaatatcttcacctaaatactagatagaagcattctcagaagcttctctgtgatgactgcattcaactcacggagttgaacactccttttgagagcgcagttttgaaactctctttctgtggcatctgcaaggggacatgtagacctctttgaagatttcgttggaaacggaatcatcttcacatcaaaactatacagaagtagtctcagaatcttctttgtgatgtttgcattcaaatccctgagttgaactttcctttccaagttcacgtttgaaacactctttttgcaggatctacaagtggatatttggaccactctgtgtccttcgttcgaaacgggtatatcttcacatgacatctagacagaagctttctcagaaaattctttgggatgattgagttgagcaaacagagctgaacactccttgcgatgtagcagtttagaaacacactttctgcagaatctgcaagtgcatatgtggacctctctgaggaattcgttggaaacgggataatttcagctgactaaacagaagcattctcagaaccttcttcgtgatgtctgcattcaactcacagtgtggaacctttctttgatagttcaggtttgaaacactctttttgtagtaactgcaaggggataattgcacttctttgaggcctaccgtagtaaaggagataacttcctataaaaagaagacagaagcattctcagaaccctcttcgtgatgtttgcattcaactcacggtgctgaacctttctttgatagttcagctttgaaacactctttttgtagaaactgcaagtggatatttggtcctctctgaggatttcgttggaaacgggataaaccgcacagaactaaacagaagcattctcagaaccttcttcgtgatgtttgcattcaactcacagtgttgaacctttctttgatagttcaggtttgaaacggtctttctgtagaaactgcaagtagatatttggacctctctgaggatttcgttggaaacgggttaaaccgcacagaactaaaacagaagcattcacagaaaactcttggtgacgactgagtttaactcacagagctgaacattcctttggatggagcagtttcgaaacacactatttctagaaggtgcaagtggatatgtgggcctctctgaggatttcgttggaaacgggataaaccgcacagaactaaacagaagcattctcagaaactactttgtgatgattgcattcaagtcacagagttgaacattccctttgacagagcagtttggaaactctctttgtgtagaatctgcaagtggagatatggaccgctttgaggcctatggtagtaaaggaaatagcttcatataaaagctagacagtagcattctcagaaacttctttgtgatgcttgcattcaactcacagagttgaactttcctttcgagagagaagctttgaaacactctttttccagaatctgcaagtggacatttggagggcgttgaggcctgtggtggaaaaggaattatcttcccgtaaaagctagatagaagctttgtcagaaacttctttgtgatgattgcattcaagtcacagagttgaaggttccttttcaaagagcagtttccaatcactctttctgtggaatctgcaagtggatatttggacctctttgaagatttcgttggaaacgggagaatcttcacagaaaagctaaacagaagcattctcagaaacttctctgtgatgtttgtgttcaactcccagagtttcacattgcttctcatagagtagttctgaaacatgcttttcgtagtgtctgcaagtggacatttggagcgctttcaggcctgtggtggaaaacgaattatggtcacataaaaactggagagaagcattctcagaaacttctctgtgacgattgcattcaactcacagagttgaaccctcctatggatagagcagtgttgaaactctctttttgtggaatctgcaagcggatatgtggacctctccgaagatgtctttggaaacgggaatatcttcacataaaaactaaacagaagcattctcagaaacttcttggtgatgtttgcattcaaatcccagagttgaaccttcctttgatagttcaggtttgaaacactctttttgtaggatctgcaagtggatatttggaccactctgtggccttcgttcgaaacgcgtacatcttcgcataaaatctagacagaagcattctcagaaaatactttgtgatgattgagttgaactcacagagctgaacattcctttggatggagcaggtttgagacacactttttgtagaatctacaagtggatatttggacctctctgaggatttcgttggaaacgggataactgcacctaactaaacggaagcattctcagaaactgctttgtgatgattgcattcacctcacagagttgaacattcctattgatagagcagtttggaaacactcctgttgtggaatgtgcaagtggagatttggagcgctttgaggcctatggtagtaaagggaatagcttcatagaaaaactagacagatgcattctcaggaactttttggtgatgtttgtattcaactcccagagttgaactttcctttggaaagagcagctatgaaacactctttttctagaatctgcaagtggacgtttggagggctttgtggtttgtggtggaaaaggaaatatcttcacctaaatactagatagaagcattctcagaagcttctctgtgatgactgcattcaactcacggagttgaacactccttttgagagcgcagttttgaaactctctttctgtggcatctgcaaggggacatgtagacctctttgaagatttcgttggaaacggaatcatcttcacataaaaactatacagaagcagtctcagaatcttctttgtgatgtttgcattcaaatcccagagttgaactttcctttcaaagttcacgtttgaaacactctttttgcaggatctacaagtggatatttggaccactctgtgtccttcgttcgaaacgggtatatcttcacacgacatctagacagaagctttctcagaaaattctttgggatgattgagtggaactcacagagctgaacattccttgcgatgtagcagtttagaaacacactttctgcagaatctgcaagtgcatatttggacctctctgaggaattcgttggaaacgggataatttcagctgactaaacagaagcattctcagaaccttcttcgtgatgtctgcattcaactcacagtgtggaacctttctttgatagttcaggtttgaaacactctttttgtagaaactgcaaggggataattgcacttctttgaggcctaccgtagtaaaggaaataacttcctatagaaagaagacagaagcattctcagaaccctcttcgtgatgtttgcattcaactcacagtgctgaacctttctttgatagttcagctttgaaacactcttcttgtagaaactgcaagtggatatttggtcctctctgaggatttcgttggaaacgggataaaccgcacagaactaaacagaagaattctcagagccctcttcgtgatgtttgcattcaactcacagtgctgaacctttctttgatagtgcagctttgaaacactctttttgtagaaactgcaagtggatgtttggtcctctctgaggatttcgttggaaacgggataaaccgcacagaactaaaacagaagcattgtcagaaacttctttgtgatgattgcattcaactcacagagttgaaggttccttttcaaacagcagtttccaatcactctttctgtggaatctgcaagtggatatttgggcctctctgaggatttcgttggaaacgggataaaacgcacagaactaaaacagaagcattctcagaaacttctctgtgatgtttgtgttcaactcccagagtttcacgttgcttttcatagagtagttctgaaacatgcttttcgtagtgtctgcaagtggacatttggagcgctttcaggcctgtggtggaaaacgaattatggtcacataaaaactggagagaagccttctcagaaacttctctgtgatgattgcattcaactcacagagttgaaccctcctatggatagagcagtgttgaaactctctttttgtggaatctgcaagtggatatgtggacctctccgaagatgtctttggaaacgggaatatcttcacataaaaactaaacagaagcattctcagaaacttcttggtgatgtttgcattcaaatcccagagttgaaccttcctttgatagttcaggtttgaaacactctttctgtaggatctgcaagtggctatttggaccactctgtggccttcgttcgaaacgggtatatcttcgcataaaatctagacagaaagcattctcagaaaatactttgtgatgattgagtttaaatcacagagctgaccattcctttggatggagcaggtttgagacacactttttgtagaatctacaagtggatatttggacctctctgaggatttcgttggaaacgggataactgcacctaactaaacggagcattctcagaaactgctttgtgatgattgcattcacctcacagagttgaccattcctattgatagagcagtttggaaacactcttgttgtggaatgtgcaagtggagatttggagcgctttgaggcctatggtagtaaagggaatagcttcatagaaaaactagacagatgcattctcaggaactttttggtgatgtttgtattcaactcccagagttgaactttccttagaaaagagcagctatgaaacactctttttctagaatctgcaagtggacgtttggagggctttgtggtttgtggtggaaaaggaaatatcttcacctaaatactagatagaagcattctcagaagcttctctgtgatgactgcattcaactcacggagttgaacactccttttgagagcgcagttttgaaactctctttctgtggcatctgcaaggggacatgtagacctctttgaagatttcgttggaaacggaatcatcttcacataaaaactatacagaagcagtctcagaatcttctttgtgatgtttgcattcaaatcccagagttgaactttcctttcaaagttcacgtttgaaacactctttttgcaggatctacaagtggatatttggaccactctgtgtccttcgttcgaaacgggtatatcttcacacgacatctagacagaagctttctcagaaaattctttgggatgattgagtggaactcacagagctgaacattccttgcgatgtagcagtttagaaacacactttctgcagaatctgcaagtgcatatttggacctctctgaggaattcgttggaaacgggataatttcagctgactaaacagaagcattctcagaaccttcttcgtgatgtctgcattcaactcacagtgtggaacctttctttgatagttcaggtttgaaacactctttttgtagaaactgcaaggggataattgcacttctttgaggcctaccgtagtaaaggaaataacttcctatagaaagaagacagaagcattctcagaaccctcttcgtgatgtttgcattcaactcacagtgctgaacctttctttgatagttcagctttgaaacactcttcttgtagaaactgcaagtggatatttggtcctctctgaggatttcgttggaaacgggataaaccgcacagaactaaacagaagcattctcagaaccttcttcgtgatgtttgcattcaactcacagtgttgaacctttctttgatagttcaggttggaaacggtctttatgtagaaactgcaagtagatatttggacctctctgaggatttcgttggaaacgggataaaccgcacagaactaaaacagaagcattcacagaaaactcttggtgacgactgagtttaactcacagagctgaacattcctttggatggagcagtttcgaaacacactatttgtagaatctgcaagtggatatttgggcctctctgaggatttcgttggaaacgggataaaccgcacagaactaaagagaagcattctcagaaactactttgtgatgattgcattcaagtcacagagctgaacattccctttgacagagaagtttggaaactctctttgtgtagaatctgcaagtggagatatggaatgctttgaggactatggtagtaaaggaaatagcttcatataaaagctagacagtagcattctcagaaacttctttgtgatgcttgcattcaactcacagagttgaactttcctttcgagagagaagctttgaaacactctttttccagaatctgcaagtggacatttggagggctttgaggcctgtggtggaaaaggaattaacttcccgtaaaagctagatagaagcattgtcagaaacttctttgtgatgattgcattcaactcacagagatgaaggttcctttacatacagcagtttccaaacaccctttctgtggaatctgcaagtggatatttggacctctttgaagatttcgttggaaacgggagaatcttcacagaaaagctaaacagaagcattctcagaaacttctctgtgatgtttgtgttcaactcccagagtttcacattgctttacatagagtagttctgaaacatgcttttcgtagtgtctgcaagtggacatttggagcgctttcaggcctgtggtggaaaacgaattatggtcccataaaaactggagagaagccttctcagaaacttctctgtgatgattgcattcaactcacagagttgaaccctcctatggatagagcattgttgaaactctctttttgtggaatctgcaagtggatatgtggacctctccgaagatgtctttggaaacgggaatatcttcacataaaaactaaacagaagcattctcagaaacttcttggtgatgtttgcattcaaatcccagagttgaaccttcctttgatagttcaggtttgaaacactctttttgtaggatctgcaagtggatatttggaccactctgtggccttcgttcgaaacgggtacatcttcccataaaatctagacagaagcattctcagaaaatactttgtgatgattgagtttaactcacagagctgaacattcctttggatggagcaggtttgagacacactttttgtagaaactacaagtggatatttggacctctctgaggatttcgttggaaacgcgataactgcacctaattaaacggaagcattctcagaaactgctttgtgatgattgcattcacctcacagagttgaacattcctattgatagagcactttggaaacactcttgttgtggaatgtgcaagtggagacttggagcgttttgaggcctatggtagtaaagggaatagcttcatagaaaaactagacagatgcattctcaggaactttttggtgatgtttgtattcaactcccagagttgaactttcctttggaaagagcagctatgaaacactctttttctagaatctgcaagtggacgtttggagggctttgtggtttgtggtggaaaaggaaatatcttcacctaaatactagatagaagcattctcagaagcttctctgtgatgactgcattcaactcacggagttgaacactccttttgagagcgcagttttgaaactctctttctgtggcatctgcaaggggacatgtagacctctttgaagatttcgttggaaacggaatcatcttcacataaaaactatacagaagcagtctcagaatcttctttgtgatgtttgcattcaaatcccagagttgaactttcctttcaaagttcacgtttgaaacactctttttgcaggatctacaagtggatatttggaccactctgtgtccttcgttcgaaacgggtatatcttcacacgacatctagacagaagctttctcagaaaattctttgggatgattgagtggaactcaacagagctgaacattccttgcgatgtagcagtttagaaacacactttctgcagaatctgcaagtgcatatttggacctctctgaggaattcgttggaaacgggataatttcagctgactaaacagaagcattctcagaacattcatcgtgatgtctgcattcaactcacagtgtggaacctttctttaatacttcaggtttgaaacactctttttgtagaaactgcaaggggataattgcacttctttgaggcctaccgtagtaaaggaaataacttcctataaaaagaagacagaagcattctcagaaccctcttcgtgatgtttgcattcaactcacagtgctgaacctttctttgatagttcagctttgaaacactcttcttgtagaaactgcaagtggatatttggtcctatctgaggatttcgttggaaacgggataaaccgcacagaactaaacagaagcattctcagaaccttcttcgtgatgtttgcattcaactcacagtgttgaacctttctttgatagttcaggtttgaaacggtctttctgtagaaactgcaagaagatatttggacctctctgaggatttcgttggaaacgggataaaccgcacagaactaaaacagaagcattcacagcaaaactcttggtgacgactgagtttaactcacagagctgaacattcctttggatggagcagtttcaaaacacactatttgtagaatgtgcaagtggatatgtgggcctctctgaggatttcgttggaaacgggataaaccgcacagaactaaaacagaagcattctcagaaactaatttgtgatgattgcattcaagtcacagagttgaacattccctttgacagagcagtttggaaactctctttgtgtagaatctgcaagtggagatatggaccgctttgaggcctatggtagtaaaggaaagagcttcatataaaagctagacagtagcattctcagaaacttctttgtgatgcttgcattcaactcacagagttgaactttcctttcgagagagaagctttgaaacactctttttccagaatgtgcaagtggagatttggagggctttgaggcctgtggtggaaaaggaattatcttcccgtaaaagctagatagaagcattgtcagaaacttctttgtgatgattgcattcaactcacagagttgaaggttccttttcaaacagcagtttccaatcactctttctgtggaatctgcaagtggatatttggacctattttgaagatttcgttggaaacgggataatcttcacagaaaagctaaacagaagcattctcagaaacttctctgtgatgtttgtgttcaactcccagagtttcacattgcttttcatagagtagttctgaaacatgcttttcgtagtgtctgcaagtggacatttggagcgctttcaggcctgtggtggaaaacgaattatggtcacataaaaactggagagaagccttctcagaaacttctctgtgatgattgcattcaactcacagagttgaaccctcctatggatagagcagtgttgaaactctctttttgtggaatctgcaagtggatatgtggacctctccgaagatgtctttggaaacgggaatatcttcacataaaaactaaacagaagcattctcagaaacttcttggtgatgtttgcattcaaatcccagagttgaaccttcctttggtagttcaggtttgaaacactctttttgtaggatctgcaagtggatatttggaccactctgtggccttcgttcgaaacgggtacatcttcgcataaaatctagacagaagcattctcagaaaatactttgtgatgattgagttgaactcacagagctgaacattcctttggatggagcaggtttgagacacactttttgtagaatctacaagtggatatttggacctctctgaggatttcgttggaaacgggataactgcacctaactaaacggaagcattctcagaaactgctttgtgatgattgcattcacctcacagagttgaacattcctattgatagagcagtttggaaacactcttgttgtggaatgtgcaagtggagatttggagcgctttgaggcctatggtagtaaagggaatagcttcatagaaaaactagacagatgcattctcaggaactttttggtgatgtttgtattcaactcccagagttgaactttcctttggaaagagcagctatgaaacactctttttctagaatctgcaagtggacgtttggagggctttgtggtttgtggtggaaaaggaaatatcttcacctaaatactagatagaagcattctcagaagcttctctgtgatgactgcattcaactcacggagttgaacactccttttgagagcgcagttttgaaactctctttctgtggcatctgcaaggggacatgtagacctctttgaagatttcgttggaaacggaatcatcttcacataaaaactatacagaagcagtctcagaatcttctttgtgatgtttgcattcaaatcccagagttgaactttcctttcaaagttcacgtttgaaacactctttttgcaggatctacaagtggatatttggaccactctgtgtccttcgttcgaaacgggtatatcttcacacgacatctagacagaagctttctcagaaaattctttgggatgattgagtggaactcacagagctgaacattccttgcgatgtagcagtttagaaacacactttctgcagaatctgcaagtgcatatttggacctctctgaggaattcgttggaaacgggataatttcagctgactaaacagaagcattctcagaaccttcttcgtgatgtctgcattcaactcacagtgtggaacctttctttgatagttcaggtttgaaacactctttttgtagaaactgcaaggggataattgcacttctttgaggcctaccgtagtaaaggaaataacttcctatagaaagaagacagaagcattctcagaaccctcttcgtgatgtttgcattcaactcacagtgctgaacctttctttgatagttcagctttgaaacactcttcttgtagaaactgcaagtggatatttggtcctctctgaggatttcgttggaaacgggataaaccgcacagaactaaacagaagcattcacagaaaactcttggtgacgactgagtttaactcacagagctgaacattcctttggatggagcagtttcgaaacacactatttgtagaatctgcaagtggatatttgggcctctctaaggatttcgttggaaacgggataaaccgcacagaactaaaacagaagcattctcagaaactactttgtgatgattgcattcaagtcacagagttgaacattccctttgacagagcagtttggaaactctctttgtgtagaatctgcaagtggagatatggaccgctttgaggcctatggtagtaaaggaaatagcttcatataaaagttagacagtagcattctcagaaacttctttgtgatgcttgcattcaactcacagagttgaactttcctttcgagagagaagctttgaaacactctttttccagaatctgcaagtggacatttggagggctttgaggcctgtggtggaaaaggaattatcttcccgtaaaagctagatagaagcattgtcagaaacttctttgtgatgattgcattcaactcacagagttgaaggttccttttcaaagagcagtttccaatcactctttctgtggaatctgcaagtggatattcggacctattttgaagatttcgttggaaacgggagaatcttcacaggaaagctaaacagaagcattctcagaaacttctctgtgatgtttgtgttcaactcccagagtttcacattgcttttcatagagtagttctgaaacatgcttttcgtagtgtctacaagtggacatttggagcgctttcaggcctgtggtggaaaacgaattatggtcacataaaaactggagagaagccttctcagaaacttctctgtgatgattgcattcaactcacagagttgaaccctcctatggatagagcagtgttgaaactctctttttgtggaatctgcaagtggatatgtggacctctccgaagatgtctttggaaacgggaatatcttcacataaaaactaaacagaagcattctcagaaacttcttggtgatgtttgcattcaaatcccagagtcgaaccttcctttgatagttcaggtttgaaacactctttttgtaggatctgcaagtggatatttggaccactctgtggccttcgttcgaaacgggtatatcttcgcataaaatctagacagaagcattctcagaaaatactttgtgatgattgagtttaactcacggagctgaacattcctttggatggagcaggtttgagacacactttttgtagaatctacaagtggatattgggacctctctgaggatttcgttggaaacgcgataactgcacctaactaaacggaagcattctcagaaactgctttgtgatgattgcattcacctcacagagttgaacattcctattgatagagcagtttggaaacactcttgttgtggaatgtgcaagtggagatttggagcgctttgaggtctatggtagtaaagggaatagcttcatagaaaaactagacagatgcattctcaggaactttttggtgatgtttgtattcaactcccagagttgaactttcctttggaaagagcagctatgaaacactctttttctagaatctgcaagtggacgtttggagggctttgtggtttgtggtggaaaaggaaatatcttcacctaaatactagatagaagcattctcagaagcttctctgtgatgactgcattcaactcacggagttgaacactccttttgagagcgcagttttgaaactctctttctgtggcatctgcaaggggacatgtagacctctttgaagatttcgttggaaacggaatcatcttcacataaaaactatacagaagcagtctcagaatcttctttgtgatgtttgcattcaaatcccagagttgaactttcctttcaaagttcacgtttgaaaccctctttttgcaggatctacaagtggatatttggaccactctgtgtccttcgttcgaaacgggtatatcttcacatgacatctagacagaagctttctcagaaaattctttgggatgattgagttgaactcacagagctgaacattccttgcgatgtagcagtttagaaacacactttctgcagaatctgcaagtgcatatttggacctctctgaggaattcgttggaaacgggataatttcagctgactaaacagaagcattctcagaaccttcttcgtgatgtctgcattcaactcacagtgtggaacctttctttgatagttcaggtttgaaacactctttttgtagaaactgcaaggggataattgcacttctttgaggcctaccgtagtaaaggaaataacttcctatagaaagaagacagaagcattctcagaaccctcttcgtgatgtttgcattcaactcacagtgctgaacctttctttgatagttcagctttgaaacactcttcttgtagaaactgcaagtggatatttggtcctctctgaggatttcgttggaaacgggataaaccgcacagaactaaacagaagaattctcagagccctcttcgtgatgtttgcattcaactcacagtgctgaacctttctttgatagtgcagctttgaaacactctttttgtagaaactgcaagtggatgtttggtcctctctgaggatttcgttggaaacgggataaaccgcacagaactaaaacagaagcattgtcagaaacttctttgtgatgattgcattcaactcacagtagttgaaggttccttttcaaacagcagtttccaatcactctttctgtggaatctgcaagtggatatttgggcctctctgaggatttcgttggaaacgggataaaacgcacagaactaaaacagaagcattctcagaaacttctctgtgatgtttgtgttcaactcccagagtttcacgttgcttttcatagagtagttctgaaacatgcttttcgtagtgtctgcaagtggacatttggagcgctttcaggcctgtggtggaaaacgaattatggtcacataaaaactggagagaagccttctcagaaacttctctgtgatgattgcattcaactcacagagttgaaccctcctatggatagagcagtgttgaaactctctttttgtggaatctgcaagtggatatgtggacctctccgaagatgtctttggaaacgggaatatcttcacataaaaactaaacagaagcattctcagaaacttcttggtgatgtttgcattcaaatcccagagttgaaccttcctttgatagttcaggtttgaaacactctttttgtaggatctgcaagtggctatttggaccactctgtggccttcgttcgaaactggtatatcttcgcataaaatctagacagaagcattctcagaaaatactttgtgatgattgagtttaaatcacagagctgaccattcctttggatggagcaggtttgagacacactttttgtagaatctacaagtggatatttggacctctctgaggatttcgttggaaacgggataactgcacctaactaaacggaagcattctcagaaactgctttgtgatgattgcattcacctcacagagttgaacattcctattgatagagcagtttggaaacactcttgttgtggaatgtgcaagtggagatttggagcgctttgaggcctatggtagtaaagggaatagcttcatagaaaaactagacagatgcattctcaggaactttttggtgatgtttgtattcaactcccagagttgaactttcctttggaaagagcagctatgaaacactctttttctagaatctgcaagtggacgtttggagggctttgtggtttgtggtggaaaaggaaatatcttcacctaaatactagatagaagcattctcagaagcttctctgtgatgactgcattcaactcacggagttgaacactccttttgagagcgcagttttgaaactctctttctgtggcatctgcaaggggacatgtagacctctttgaagatttcgttggaaacggaatcatcttcacataaaaactatacagaagcagtctcagaatcttctttgtgatgtttgcattcaaatcccagagttgaactttcctttcaaagttcacgtttgaaacactctttttgcaggatctacaagtggatatttggaccactctgtgtccttcgttcgaaacgggtatatcttcacacgacatctagacagaagctttctcagaaaattctttgggatgattgagtggaactcacagagctgaacattccttgcgatggagcagtttagaaacacactttctgcagaatctgcaagtgcatatttggacctctctgaggaattcgttggaaacgggataatttcagctgactaaacagaagcattctcagaaccttcttcgtgatgtctgcattcaactcacagtgtggaacctttctttgatagttcaggtttgaaacactctttttgtagaaactgcaaggggataattgcacttctttgaggcctaccgtagtaaaggaaataacttcctatagaaagaagacagaagcattctcagaaccctcttcgtgatgtttgcattcaactcacagtgctgaacctttctttgatagttcagctttgaaacactcttcttgtagaaactgcaagtggatatttggtcctctctgaggatttcgttggaaacgggataaaccgcacagaactaaacagaagaactctcagtagccctcttcgtgatgtttgcattcaactcacagtgctgaacctttctttgatagtgcagctttgaaacactctttttgtagaaactgcaagtggatatttggtcctctctgaggatttcgttggaaacgggataaaccgcacagaactaaaacagaagcattctcagaaccttcttcgtgatgtttgcattcaactcacagtgttgaacctttctttgatagttcaggtttgaaacggtctttctgtagaaactgcaagtagatatttggacctctctgaggatttcgttggaaacgggataacccgcacagaactaaaacagaagcattcacagaaaactcttggtgacgactgagtttaactcacagagctgaacattcctttggatggagcagtttcgaaacacactatttgtagaatgtgcaagtggatatttgggcctctctgaggatttcgttggaaacgggataaaccgcacagaactaaacagaagcattctcagaaactactttgtgatgattgcattcaagtcacagagttgaacattccctttgacagagcagtttggaaactctctttgtgtagaatctgcaagtggagatatggaccgctttgaggcctatggtagtaaaggaaatagcttcatataaaagctagacagtagcattctcagaaacttctttgtgatgcttgcattcaactcacagatgttgaactttcctttcgagagagaagctttgaaacactctttttccagaatctgcaagtggacatttggagggctttgaggcctgtggtggaaaaggaattatcttcccgtaaaagctagatagaagcattgtcagaaacttctttgtgatgattgcattcaactcacagagttgaaagttccttttcaaagagcagtttccaatcactctttgtgtggaatctgcaagtggatatttggacctattttgaagatttcgttggaaacgggagaatcttcacaggaaagctaaacagaagcattctcagaaacttctctgtgatgtttgtgttcaactcccagagtttcacattgcttttcatagagtagttctgaaacatgcttttcgtagtgtctacaagtggacatttggagcgctttcaggcctgtggtggaaaacgaattatggtcacataaaaactggagagaagccttctcagaaacttctctgtgatgattgcattcaactcacagagttgaaccctcctatggatagagcagtgttgaaactctctttttgtggaatctgcaagtggatacgtggacctctccgaagatgtctttggaaacgggaatatcttcacataaaaactaaacagaagcattctcagaaacttcttggtgatgtttgcattcaaatcccagagttgaaccttcctttgatagttcaggtttgaaacactctttttgtaggatctgcaagtggatatttggaccactctgtggccttcgttcgaaacgggtatatcttcgcataaaatctagacagaagcattctcagaaaatactttgtgatgattgagttaaaatcacagagctgaacattcctttggatggagcaggtttgagacacactttttgtagaatctacaagtggatatttggacctctctgaggatttcgttggaaacgggataactgcacctaactaaacggaagcattctcagaaactgctttgtgatgattgcattcacctcacagagttgaacattcctattgatagagcagtttggaaacactcttgttgtggaatgtgcaagtggagatttggagcgctttgaggcctatggtagtaaagggaatagcttcatagaaaaactagacagatgcattctcaggaactttttggtgatgtttgtattcaactcccagagttgaactttcctttggaaagagcagctatgaaacactctttttctagaatctgcaagtggacgtttggagggctttgtggtttgtggtggaaaaggaaatatcttcacctaaatactagatagaagcattctcagaagcttctctgtgatgactgcattcaactcacggagttgaacactccttttgagagcgcagttttgaaactctctttctgtggcatctgcaaggggacatgtagacctctttgaagatttcgttggaaacggaatcatcttcacataaaaactatacagaagcagtctcagaatcttctttgtgatgtttgcattcaaatcccagagttgaactttcctttcaaagttcacgtttgaaacactctttttgcaggatctacaagtggatatttggaccactctgtgtccttcgttcgaaacgggtatatcttcacacgacatctagacagaagctttctcagcaaaattctttgggatgattgagtggaactcacagagctgaacattccttgcgatgtagcagtttagaaacacactttctgcagaatctgcaagtgcatatttggacctctctgaggaattcgttggaaacgggataatttcagctgactaaacagaagcattctcagaaccttcttcgtgatgtctgcattcaactcacagtgtggaacctttctttgatagttcaggtttgaaacactctttttgtagaaactgcaaggggataatttcacttctttgaggcctaccgtagtaaaggaaataacttcctatagaaagaagacagaagcattctcagaaccctcttcgtgatgtttgcattcaactcacagtgctgaacctttctttgatagttcagctttgaaacactcttcttgtagaaactgcaagtggatatttggtcctctctgaggatttcgttggaaacgggataaaccgcacagaactaaacagaagaattctcagagccctcttcgtgatgtttgcattcaactcacagtgctgaacctttctttgatagtgcagctttgaaacactctttttgtagaaactgcaagtggatgtttggtcctctctgaggatttcgttggaaacgggataaaccgcacagaactaaaacagaaaagcattgtcagaaacttctttgtgatgattgcattcaactcacagagttgaaggttccttttcaaacagcagtttccaatcactctttctgtggaatctgcaagtggatatttgggcctctctgaggatttcgttggaaacgggataaaacgcacagaactaaaacagaagcattctcagaaacttctctgtgatgtttgtgttcaactcccagagtttcacgttgcttttcatagagtagttctgaaacatgcttttcgtagtgtctgcaagtggacatttggagcgctttcaggcctgtggtggaaaacgaattatggtcacataaaaactggagagaagccttctcagaaacttctctgtgatgattgcattcaactcacagagttgaaccctcctatggatagagcagtgttgaaactctctttttgtggaatctgcaagtggatatgtggacctctccgaagatgtctttggaaacgggaatatcttcacataaaaactaaacagaagcattctcagaaacttcttggtgatgtttgcattcaaatcccagagttgaaccttcctttgatagttcaggtttgaaacactctttttgtaggatctgcaagtggctatttggaccactctgtggccttcgttcgaaacgggtatatcttcgcataaaatctagacagaagcattctcagaaaatactttgtgacgattgagtttaaatcacagagctgaacattcctttggatggagcaggtttgagacacactttttgtagaatctacaagtggatatttggacctctctgaggatttcgttggaaacgggataactgcacctaactaaacggaagcattctcagaaactgctttgtgatgattgcattcacctcacagagttgaacattcctattgatagagcagtttggaaacactcttgttgtggaatgtgcaagtggagatttggagcgctttgaggcctatggtagtaaagggaatagcttcatagaaaaactagacagatgcattctcaggaactttttggtgatgtttgtattcaactcccagagttgaactttcctttggaaagagcagctatgaaacactctttttctagaatctgcaagtggacgtttggagggctttgtggtttgtggtggaaaaggaaatatcttcacctaaatactagatagaagcatcctcagaagcttctctgtgatgactgcattcaactcacggagttgaacactccttttgagagcgcagttttgaaactctctttctgtggcatctgcaaggggacatgtagacctctttgaagatttcgttggaaacggaatcatcttcacataaaaactatacagaagcagtctcagaatcttctttgtgatgtttgcattcaaatccccgagttgaactttcctttcaaagttcacgtttgaaacactctttttgcaggatctacaagtggatatttggaccactctgtgtccttcgttcgaaacgggtatatcttcacatgacatctagacagaagctttctcagaaaattctttgggatgattgagttgaactcacagagctgagcattccttgcgatgtagcagtttagaaacacactttctgcagaatctgcaagtgcatatttggacctctgtgaggaattcgttggaaacgggataatttcagctgactaaacagaagcattctcagaaccttcttcatgatgtctgcattcaactcacagtgtggaacctttctttgatagttcaggtttgaaacactctttttgttgaaactgcaggggataattgcacttctttgaggcctactgtagcaaaagaaataacttcctataaaaagaagacagaagcattctcagaaccctccttcgtgatgtttgcattcaactcacagtgctgaacctttctttgatagttcagctttgaaacactctttttgtagaaactgcaagtggatatttggtcctctctgagcatttcgttggaaacgggataaactgcacagaactaaacagaagcattctcagaaccttcttcgtgatgtttgcattcaactcacagtgctgaacctttctttgatagttcagctttgaaacactctttttgtagaaactgcaagtggatatttggacctctctgaggatttcgttggaaacgggataaactgcacagaactaaaacagaagcattctcagaaccttcttcgtgatgtttgcattcaactcacagtgttgaacctttctttgatagttcaggtttgaaacggtctttctgtagaaactgcaagtagatatttggacctctctgaggatttcgttggaaacgggataaaccgcacacaactaaaacagaagcattcacagaaaactcttggtgacgactgagtttaactcacagaactgaacattcctttggatggagcagtttcgaaacacactatttgtagaatgtgcaagtggatatgtgggcctctctgaggatttcgttggaaacgggataaaccgcacagaactaaacagaagcattctcagaaactacgttgtgatgattgcattcaagtcacagagctgaacattccctttgacagagcagtttggaaactctctttgtgtagaatctgcaagtggagatatggaccgctttgaggcctatggtagtaaaggaaatagcttcatataaaagctagacagtagcattctcagaaacttctttgtgatgcttgcattcaactcacagagttgaactttcctttcgagagagaagctttgaaacactctttttccagaatctgcaagtggacatttggagggctttgaggcctgtggtggaaaaggaattatcttcccgtaaaagctagatagaagcattgtcagaaacttctttgtgatgattgcattcaactcacagagttgaaggttccttttcaaagagcagtttccaatcactctttctgtggaatctgcaagtggatatttggacctctttgaagatttcgttggaaacgggagaatcttcacagaaaagctaaacagaagcattctcagaaacttctctgtgatgtttgtgttcaactcccagagtttcacattgcttttcatagagtagttctgaaacatgcttttcgtagtgtctacaagtggacatttggagcgctttcaggcctgtggtggaaaacgaattatggtcacataaaaactggagagaagccttctcagaaacttctctgtgatgattgcattcaactcacagagttgaaccctcctatggatagagcagtgttgaaactctctttttgtggaatctgcaagtggatatgtggacctctccgaagatgtctttggaaacgggaatatcttcacataaaaactaaacagaagcattctcagaaacttcttggtgatgtttgcattcaaatcccagagttgaaccttcctttgatagttcaggtttgaaacactctttctgtaggatctgcaagtggctatttggaccactctgtggccttcgttcgaaacgggtatatcttcgcataaaatctagacagaagcattctcagaaaatactttgtgatgattgagtttaaatcacagagctgaccattcctttggatggagcaggtttgagacacactttttgtagaatctacaagtggatatttggacctctctgaggatttcgttggaaacgggataactgcacctaactaaacggaagcattctcagaaactgctttgtgatgattgcattcacctcacagagttgaacattcctattgatagagcagtttggaaacactcttgttgtggaatgtgcaagtggagatttggagcgctttgaggcctatggtagtaaagggaatagcttcatagaaaaactagacagatgcattctcaggaactttttggtgatgtttgtattcaactcccagagttgaactttcctttggaaagagcagctatgaaacactctttttctagaatctgcaagtggacgtttggagggctttgtggtttgtggtggaaaaggaaatatcttcacctaaatactagatagaagcattctcagaagcttctctgtgatgactgcattcaactcacggagttgaacactccttttgagagcgtagttttgaaactctctttctgtggcatctgcaaggggacatgtagacctctttgaagatttcgttggaaacggaatcatcttcacataaaaactatacagaagcagtctcagaatcttctttgtgatgtttgcattcaaatcccagagttgaactttcctttcaaagttcacgtttgaaacactctttttgcaggatctacaagtggatatttggaccactctgtgtccttcgtgcgaaacgggtatatcttcacatgacatctagacagaagctttctcagaaaattctttgggatgattgagtggaactcacagagctgaacattccttgcgatgtagcagtttagaaacacactttctgcagaatctgcaagtgcatatttggacctctctgaggaattcgttggaaacgggataatttcagctgactaaacagaagcattctcagaaccttcttcgtgatgtctgcattcaactcacattgtggaacctttctttgatagctcaggtttgaaacactctttttgtagaaactgcaaggggataattgcacttctttgaggcctaccgtagtaaaggaaataacttcctatagaaagaagacagaagcattctcagaaccctcttcgtgatgtttgcattcaactcacaagtgctgaacctttctttgatagttcagctttgaaacactcttcttgtagaaactgcaagtggatatttggtcctctctgaggatttcgttggaaacgggataaaccgcacagaactaaacagaagcattctcagaaccttcttcgtgatgtttgcattcaactcacagtgttgaacctttctttgatagttcaggtttgaaacggtctttctgtagaaactgcaagtagatatttggacctctctgaggatttcgttggaaacgggataaaccgcacagaactaaaacagaagcattcacagaaaactcttggtgacgaatgagtttaactcacagagctgaacattcctttggatggagcagtttcgaaacacactatttgtagaatgtgcaagtggatatttgggcctctctgaggatttcgttggaaacgggataaaccgcacagaactaaacagaagcattctcagaaactactttgtgatgattgcattcaagtcacagagttgaacattccctttgacagagcagtttggaaactctctttgtgtagaatctgcaagtggagatatggaccgctttgaggcctatggtagtaaaggaaatagcttcatataaaagctagacagtagcattctcagaaacttctttgtgatgcttgcattcaactcacagagttgaactttcctttcgagagagaagctttgaaacactctttttccagaatgtgcaagtggacatttggggagctttgaggcctgtggtggaaaaggaattatcttcccgtaaaagctagatagagcattgtcagaaacttctttgtgatgattgcattcaactcacagagttgaaggttccttttcaaacagcagtttccaatcactctttctgtggaatctgcaagtggatatttcgacctctttgaagatttcgttggaaacgggagaatcttcacagaaaagctaaacagaagcattctcagaaacttctctgtgatgtttgtgttcaactcccagagtttcacattgcttttcatagagtagttctgaaacatgcttttcgtagtgtctacaagtggacatttggagcgctttcaggcctgtggtggaaaacgaattatggtcacataaaaactgggagagaagccttctcagaaacttctctgtgatgattgcattcaactcacagagttgaaccctactatggatagagcagtgttgaaactctctttttgtggaatctgcaagtggatatgtggacctctccgaagatgtctttggaaaggggactatcttcacataaaaactaaacagaagcattctcagaaacttcttggtgatgtttgcattcaaatcccagagttgaaccttcctttgatagttcaggtttgaaacactctttttgtaggatctgcaagtggatatttggaccactctgtggccttcgttcgaaacgggtacatcttcgcataaaatctagacagaagcattctcagaaaatactttgtgatgattgagtttaactcacagagctgaacattcctttggatggagcaggcttgagacacactttttgtagaatctacaagtggatatttggacctctctgaggatttcgttggaaacgagataactgcacctaactaaacggaagcattctcagaaactgctttgtgatgattgcattcacctcacagagttgaacattcctattgatagagcagtttggaaacactcctgttgtggaatgtgcaagtggagatttggagcgctttgaggcctatggtagtaaagggaatagtttcatagaaaaactagacagatgcattctcaggaactttttggtgatgtttgtattcaactcccagagttgaactttcctttggaaagagcagctatgaaacactctttttctagaatctgcaagtggacgtttggagggctttgtggtttgtggtggaaaaggaaatatcttcacctaaatactagatagaagcattctcagaagcttctctgtgatgactgcattcaactcacggagttgaacactccttttgagagcgcagttttgaaactctctttctgtggcatctgcaaggggacatgtagacctctttgaagatttcgttggaaacggaattcatcttcacataaaaactatacagaagcagtctcagaatcttctttgtgatgtttgcattcaaatcccagagttgaactttcctttcaaagttcacgtttgaaacactctttttgcaggatctacaagtggatatttggaccactctgtgtccttcgttggaaacgggtatatcttcacatgacatctagacagaagctttctcagaaaattctttgggatgattgagtggaactcacagagctgaacattccttgcgatgtagcagtttagaaacacactttctgcagaatctgcaagtgcatatttggacctctctgaggaattcgttggaaacgggataatttcagctgactaaacagaagcattctcagaaccttcttcgtgatgtctgcattcaactcacagtgtggaacctttctttgatagttcaggtttgaaacactctttttgtagaaactgcaaggggataattgcacttctttgaggcctaccgtagtaaaggaaataacttcctatagaaagaagacagaagcattctcagaaccctcttcgtgatgtttgcattcaactcacagtgctgaacctttctttgatagttcagctttgaaacactcttcttgtagaaactgcaagtggatatttggtcctctctgaggatttcgttggaaacgggataaacctcacagaactaaacagaagaattctcagagccctcttcgtgatgtttgcattcaactcacagtgctgaacctttctttgatagtgcagctttgaaacactctttttgtagaaactgcaagtggatgtttggtcctctctgaggatttcgttggaaacgggataaaccgcacagaactaaaacagaagcattgtcagaaacttctttgtgatgattgcattcaactcacagagttgaaggttccttttcaaacagcagtttccaatcactctttctgtggaatctgcaagtggatatttgggcctctctgaggatttcgttggaaacgggataaaacgcacagaactaaaacagaagcattctcagaaacttctctgtgatgtttgtgttcaactcccagagtttcacgttgcttttcatagagtagttctgaaacatgcttttcgtagtgtctgcaagtggacatttggagcgctttcaggcctgtggtggaaaacgaattatggtcacataaaaactggagagaagccttctcagaaacttctctgtgatgattgcattcaactcacagagttgaaccctcctatggatagagcagtgttgaaactctctttttgtggaatctgcaagtggatatgtggacctctccgaagatgtctttggaaacgggaatatcttcacataaaaactaaacagaagcattctcagaaacttcttggtgatgtttgcattcaaatcccagagttgaaccttcctttgatagttcaggtttgaaacactctttttgtaggatctgcaagtggctatttggaccactctgtggccttcgttcgaaacgggtatatcctcgcataaaatctagacagaagcattctcagaaaatactttgtgatgattgagtttaaatcacagagctgaccattcctttggatggagcaggtttgagacacactttttgtagaatctacaagtggatatttggacctctctgaggatttcgttggaaacgggataactgcacctaactaaacggaagcattctcagaaactgctttgtgatgattgcattcacctcacagagttgaacattcctattgatagagcagtttggaaacactcttgttgtggaatgtgcaagtggagatttggagcgctttgaggcctatggtagtaaagggaatagcttcatagaaaacctagacagatgcattctcaggaactttttggtgatgtttgtattcaactcccagagttgaactttcctttggaaagagcagctatgaaacactctttgtctagaatctgcaagtggacgtttggagggctttgtggtttgtggtggaaaaggaaatatcttcacctaaatactagatagaagcattctcagaagcttctctgtgatgactgcattcaactcacggagttgaacactccttttgagagcgcagttttgaaactctctttctgtggcatctgcaaggggacatgtagacctctttgaagatttcgttggaaacggaatcatcttcacatcaaaactatacagaagcagtctcagaatcttctttgtgatgtttgcattcaaatcccagagttgaactttcctttcaaagttcacgtttgaaacactctttttgcaggatctacaagtggatatttggaccactctgtgtccttcgttcgaaacgggtataccttcacatgacatctagacagaagctttctcagaaaattctttgggatgattgagttgagcaaacagagctgaacattccttgcgatgtagcagtttagaaacacactttctgcagaatctgcaagtgcatatgtggacctctctgaggaattcgttggaaatgggataatttcagctgactaaacagaagcattctcagaaccttcttcgtgatgtctgcattcaactcacagtgtggaacctttctttgatagttcaggtttgaaacactctttttgtagaaactgcaaggggataattgcacttctttgaggcctaccgtagtaaaggaaataacttcctatagaaagaagacagaagcattctcagaaccctcttcgtgatgtttgcattcaactcacagtgctgaacctttctttgatagttcagctttgaaacactcttcttgtagaaactgcaagtggatatttggtcctctctgaggatttcgttggaaacgggataaaccgcacagaactaaacagaagaattctcagagccctcttcgtgatgtttgcattcaactcacagtgctgaacctttctttgatagtgcagctttgaaacactctttttgtagaaactgcaagtggatgtttggtcctctctgaggatttcgttggaaacgggataaaccgcacagaactaaaacagaagcattgtcagaaacttctttgtgatgattgcattcaactcacagagttgaaggttccttttcaaacagcagtttccaatcactctttctgtggaatctgcaagtggatatttgggcctctctgaggatttcgttggaaacgggataaaacgcacagaactaaaacagaagcattctcagaaacttctctgtgatgtttgtgttcaactcccagagtttcacgttgcttttcatagagtagttctgaaacatgcttttcgtagtgtctgcaagtggacatttggagcgctttcaggcctgtggtggaaaacgaattatggtcacataaaaactggagagaagccttctcagaaacttctctgtgatgattgcattcaactcacagagttgaaccctcctatggatagagcagtgttgaaactctctttttgtggaatctgcaagtggatatgtggacctctctgaagatgtctttggaaacgggaatatcttcacataaaaactaaacagaagcattctcagaaacttcttggtgatgtttgcattcaaatcccagagttgaaccttcctttgatagttcaggtttgaaacactctttttgtaggatctgcaagtggctatttggaccactctgtggccttcgttcgaaacgggtatatcttcgcataaaatctagacagaagcattctcagaaaatactttgtgatgattgagtttaaatcacagagctgaccattcctttggatggagcaggtttgagacacactttttgtagaatctacaagtggatatttggacctctctgaggatttcgttggaaacgggataactgcacctaactaaacggaagcattctcagaaactgctttgtgatgattgcattcacctcacagagttgaacattcctattgatagagcagtttggaaacactcttgttgtggaatgtgcaagtggagatttggagcgctttgaggcctatggtagtaaagggaatagcttcatagaaaaactagacagatgcattctcaggaaccttttggtgatgtttgtattcaactcccagagttgaactttcctttggaaagagcagctatgaaacactctttttctagaatctgcaagtggacgtttggagggctttgtggtttgtggtggaaaaggaaatatcttcacctaaatactagatagaagcattctcagaagcttctctgtgatgactgcattcaactcacggagttgaacactccttttgagagcgcagttttgaaactctctttctgtggcatctgcaaggggacatgtagacctctttgaagatttcattggaaacggaatcatcttcacataaaaactatacagaagcagtctcagaatcttctttgtgatgtttgcattcaaatcccagagttgaactttcctttcaaagttcacgtttgaaacactctttttgcaggatctacaagtggatatttggaccactctgtgtccttcgttcgaaacgggtatatcttcacatgacatctagacagaagctttctcagaaaattctttgggatgattgagttgaactcacagagctgaacattccttgcgatggagcagtttagaaacacactttctgcagaatctgcaagtgcatatttggacctctgtgaggaattcgttggaaacgggataattacagctgactaaacagaagcattctcagaaccttcttcgtgatgtctgcattcaactcacagtgtggaacctttctttgatagttcaggtttgaaacactctatttgtggaaactgcaaggggataattgcacttctttgaggcctaccgtagtaatggaaataacttcctataaaaagaagacagacgcattctcagaaccttcttcgtgatgtttgcattcaactcacagtgctgaacctttctttgatagttcagctttgaaacactctttttgtagaaactgcaagtggatatttgatcctctctgaggatttctttggaaacggcataaacagcacagaactaaacagaagcattctcagaaccttcttcgtgatgtttgcattcaactcacagtgttgaacctttctttgatagttcaggtttgaaacggtctttgtgtagagactgcaagtagatatttggacctctctgaggatttcgttggaaacgggataaaccgcacagaactaaaacagaagcattcacagaaaacacttggtgacgactgagtttaactcacagagctgaacattcctttggatggagcagtttcgaaacacactatttgtagaatgtgcaagtggatatgtgggcctctctgaggatttcgttggaaacgggataaaccgcacagaactaaacagaagcattctcagaaactactttgtgatgattgcattcaagtcacagagttgaacattccctttgacagagcagtttggaaactctctttgtgtagaatctgcaagtggagatatggaccgctttgaggcctatggtagtaaaggaaatagcttcatataaaagctagacagtagcattctcagaaacttctttgtgatgcttgcattcaactcacagagttgaactttcctttcgagagagaagctttgaaacactctttttccagaatctgcaagtggacatttggagggctttgaggcctgtggtggaaaaggaattatcttcccgtaaaagctagatagaagcattgtcagaaacttctttgtgatgattgcattcaactcacagagttgaaggttccttttcaaagagcagtttccaatcactctttctgtggaatctgcaagtggatatttggacctattttgaagatttcgttggaaacgggagaatcttcacaggaaagctaaacagaagcattctcagaaacttctctgtgatgtttgtgttcaactcccagagtttcacattgcttttcatagagtagttctgaaacatgcttttcgtagtgtctacaagtggacatttggagcgctttcaggcctgtggtggaaaacgaattatggtcacataaaaactggagagaagccttctcagaaacttctctgtgatgattgcattcaactcacagagttgaaccctcctatggatagagcagtgttgaaactctctttttgtggaacctgcaagtggctatgtggacctctccgaagatgtctttggaaacgggaatatcttcacataaaaactaaacagaagcattctcagaaacttcttggtgatgtttgcattcaaatcccagagttgaaccttcctttgatagttcaggtttgaaacactctttttgtaggatctgcaagtggatatttggaccactctgtggccttcgttcgaaacgggtatatcttcgcataaaatctagacagaagcattctcagaaaatactttgtgatgattgagtttaactcacagagctgaacatttctttggatggagcaggtttgagacacaccttttgtagaatctacaagtggatatttggacctctctgaggatttcgttggaaacgggataactgcacctaactaaacggaagcattctcagaaactgctttgtgatgattgcattcacctcacagagttgaacattcctattgatagagcagtttggaaacactcttgttgtggaatgtgcaagtggagatttggagcgctttgaggcctatggtagtaaagggaatagcttcatagaaaaactagacagatgcattctcaggaactttttggtgatgtttgtattcaactcccagagttgaactttcctttggaaagagcagctatgaaacactctttttctagaatctgcaagtggacgtttggagggctttgtggtttgtggtggaaaaggaaatatcttcacctaaatactagatagaagcattctcagaagcttctctgtgatgactgcattcaactcacggagttgaacactccttttgagagcgcagttttgaaactctctttctgtggcatctgcaaggggacatgtagacctctttgaagatttcgttggaaacggaatcatcttcacataaaaactatacagaagcagtctcagaatcttctttgtgatgtttgcattcaaatcccagagttgaactttcctttcaaagttcacgtttgaaacactctttttgcaggatctacaagtggatatttggaccactctgtgtccttcgttcgaaacgggtatatcttcacacgacatctagacagaagctttctcagaaaattctttgggatgattgagtggaactcacagagctgaacattccttgcgatgtagcagtttagaaacacactttctgcagaatctgcaagtgcatatttggacctctctgaggaattcgttggaaacgggataatttcagctgactaaacagaagcattctcagaaccttcttcgtgatgtctgcattcaactcacagtgtggaacctttctttgatagttcaggtttgaaacactctttttgtagaaactgcaaggggataattgcacttctttgaggcctaccgtagtaaaggaaataacttcctatagaaagaagacagaagcattctcagaaccctcttcgtgatgtttgcattcaactcacagtgctgaacctttctttgatagttcagctttgaaacactcttcttgtagaaactgcaagtggatatttggtcctctctgaggatttcgttggaaacgggataaaccgcacagaactaaacagaagaattctcagagccctcttcgtgatgtttgcattcaactcacagtgctgaacctttctttgatagtgcagctttgaaacactctttttgtagaaactgcaagtggatgtttggtcctctctgaggatttcgttggaaacgggataaaccgcacagaactaaaacagaagcattgtcagaaacttctttgtgatgattgcattcaactcacagagttgaaggttccttttcaaacagcagtttccaatcactctttctgtggaatctgcaagtggatatttgggcctctctgaggatttcgttggaaacgggataaaacgcacagaactaaaacagaagcattctcagaaacttctctgtgatgtttgtgttcaactcccagagtttcacgttgcttttcatagagtagttctgaaacatgcttttcgtagtgtctgcaagtggacatttggagcgctttcaggcctgtggtggaaaacgaattatggtcacataaaaactggagagaagccttctcagaaacttctctgtgatgattgcattcaactcacagagttgaaccctcctatggatagagcagtgttgaaactctctttttgtggaatctgcaagtggatatgtggacctctccgaagatgtctttggaaacgggaatatcttcacataaaaactaaacagaagcattctcagaaacttcttggtgatgtttgcattcaaatcccagagttgaaccttcctttgatagttcaggtttgaaacactctttctgtaggatctgcaagtggctatttggaccactctgtggccttcgttcgaaacgggtatatcttcgcataaaatctagacagaagcattctcagaaaatactttgtgatgattgagtttaaatcacagagctgaccattcctttggatggagcaggtttgagacacactttttgtagaatctacaagtggatatttggacctctctgaggatttcgttggaaacgggataactgcacctaactaaacggaagcattctcagaaactgctttgtgatgattgcattcacctcacagagttgaacattcctattgatagagcagtttggaaacactcttgttgtggaatgtgcaagtggagatttggagcgctttgaggcctatggtagtaaagggaatagcttcatagaaaaactagacagaagcagtctcagaatcttctttgtgatgtttgcattcaaatcccagagttgaactttcctttcaaagttcacgtttgaaacactctttttgcaggatctacaagtggatatttggaccactctgtgtccttcgttcgaaacgggtatatcttcacacgacatctagacagaagctttctcagaaaattctttgggatgattgagtggaactcacagagctgaacattccttgcgatggagcagtttagaaacacactttctgcagaatctgcaagtgcatatttggacctctctgaggaattcgttggaaacgggataatttcagctgactaaacagaagcattctcagaaccttcttcgtgatgtctgcattcaactcacagtgtggaacctttctttgatagttcaggtttgaaacactctttttgtagaaactgcaaggggataattgcacttctttgaggcctaccgtagtaaaggaaataacttcctatagaaagaagacagaagcattctcagaaccctcttcgtgatgtttgcattcaactcacagtgctgaacctttctttgatagttcagctttgaaacactcttcttgtagaaactgcaagtggatatttggtcctctctgaggatttcgttggaaacgggataaaccgcacagaactaaacagaagaattctcagagccctcttcgtgatgtttgcattcaactcacagtgctgaacctttctttgatagtgcagctttgaaacactctttttgtagaaactgcaagtggatgtttggtcctctctgaggatttcgttggaaacgggataaaccgcacagaactaaaacagaagcattgtcagaaacttctttgtgatgattgcattcaactcacagagttgaaggttccttttcaaacagcagtttccaatcactctttctgtggaatctgcaagtggatatttgggcctctctgaggatttcgttggaaacgggataaaacgcacagaactaaaacagaagcattctcagaaacttctctgtgatgtttgtgttcaactcccagagtttcacgttgcttttcatagagtagttctgaaacatgcttttcgtagtgtctgcaagtggacatttggagcgctttcaggcctgtggtggaaaacgaattatggtcacataaaaactggagagaagccttctcagaaacttctctgtgatgattgcattcaactcacagagttgaaccctcctatggatagagcagtgttgaaactctctttttgtggaatctgcaagtggatatgtggacctctccgaagatgtctttggaaacgggaatatcttcacataaaaactaaacagaagcattctcagaaacttcttggtgatgtttgcattcaaatcccagagttgaaccttcctttgatagttcaggtttgaaacactctttctgtaggatctgcaagtggctatttggaccactctgtggccttcgttcgaaacgggtatatcttcgcataaaatctagacagaagcattctcagaaaatactttgtgatgattgagtttaaatcacagagctgaccattcctttggatggagcaggtttgagacacactttttgtagaatctacaagtggatatttggacctctctgaggatttcgttggaaacgggataactgcacctaactaaacggaagcattctcagaaactgctttgtgatgattgcattcacctcacagagttgaacattcctattgatagagcagtttggaaacactcttgttgtggaatgtgcaagtggagatttggagcgctttgaggcctgtggtagtaaagggaatagcttcatagaaaaactagacagatgcattctcaggaaccttttcgtgatgtttgtattcaactcccagagttgaactttcctttggaaagagcagctatgaaacactctttttctagaatctgcaagtggacgtttggagggctttgtggtttgtggtggaaaaggaaatatcttcacctaaatactagatagaagcattctcagaagcttctctgtgatgactgcattcaactcacggagttgaacactccttttgagagcgcagttttgaaactctctttctgtggcatctgcaaggggacatgtagacctctttgaagatttcgttggaaacggaatcatcttcacataaaaactatacagaagcagtctcagaatcttctttgtgatgtttgcattcaaatcccagagttgaactttcctttcaaagttcacgtttgaaacactctttttgcaggatctacaagtggatatttggaccactctgtgtccttcgttcgaaacgggtatatcttcacacgacatctagacagaagctttctcagaaaattctttgggatgattgagtggaactcacagagctgaacattccttgcgatgtagcagtttagaaacacactttctgcagaatctgcaagtgcatatttggacctctctgaggaattcgttggaaacgggataatttcagctgactaaacagaagcattctcagaaccttcttcgtgatgtctgcattcaactcacagtgtggaacctttctttgatagttcaggtttgaaacactctttttgtagaaactgcaaggggataattgcacttctttgaggcctaccgtagtaaaggaaataacttcctatagaaagaagacagaagcattctcagaaccctcttcgtgatgtttgcattcaactcacagtgctgaacctttctttgatagttcagctttgaaacactcttcttgtagaaactgcaagtggatatttggtcctctctgaggatttcgttggaaacgggataaaccgcacagaactaaacagaagaattctcagagccctcttcgtgatgtttgcattcaactcacagtgctgaacctttctttgatagtgcagctttgaaacactctttttgtagaaactgcaagtggatgtttggtcctctctgaggatttcgttggaaacgggataaaccgcacagaactaaaacagaagcattgtcagaaacttctttgtgatgattgcattcaactcacagagttgaaggttccttttcaaacagcagtttccaatcactctttctgtggaatctgcaagtggatatttgggcctctctgaggatttcgttggaaacgggataaaacgcacagaactaaaacagaagcattctcagaaacttctctgtgatgtttgtgttcaactcccagagtttcacgttgcttttcatagagtagttctgaaacatgcttttcgtagtgtctgcaagtggacatttggagcgctttcaggcctgtggtggaaaacgaattatggtcacataaaaactggagagaagcattctcagaaaatactttgtgatgattgagtttaaatcacagagctgaccattcctttggatggagcaggtttgagacacactttttgtagaatctacaagtggatatttggacctctctgaggatttcgttggaaacgggataactgcacctaactaaacggaagcattctcagaaactgctttgtgatgattgcattcacctcacagagttgaacattcctattgatagagcagtttggaaacactcttgttgtggaatgtgcaagtggagatttggagcgctttgaggcctatggtagtaaagggaatagcttcatagaaaaactagacagatgcattctcaggaaccttttggtgatgtttgtattcaactcccagagttgaactttcctttggaaagagcagctatgaaacactctttttctagaatctgcaagtggacgtttggagggctttgtggtttgtggtggaaaaggaaatatcttcacctaaatactagatagaagcattctcagaagcttctctgtgatgactgcattcaactcacggagttgaacactccttttgagagcgtagttttgaaactctctttctgtggcatctgcaaggggacatgtagacctctttgaagatttcgttggaaacggaatcatcttcacataaaaactatacagaagcagtctcagaatcttctttgtgatgtttgcattcaaatcccagagttgaactttcctttcaaagttcacgtttgaaacactctttttgcaggatctacaagtggatatttggaccactctgtgtccttcgttcgaaacgggtatatcttcacaggacatctagacagaagctttctcagaaaattctttgggatgattgagtggaactcacagagctgaacattccttgcgatgtagcagtttagaaacacactttctgcagaatctgcaagtgcatatttggacctctctgaggaattcgttggaaacgggataatttcagctgactaaatataagcattctcagaaccttcttcgtgatgtctgcattcaactcacagtgtggaacctttctttgatagttcaggtttgaaacactctttttgtagaaactgcaaggggataattgcacttctttgaggcctaccgtagtaaaggaaataacttcctatagaaagaagacagaagcattctcagaaccctcttcgtgatgtttgcattcaactcacagtgctgaacctttctttgatagttcagctttgaaacactcttcttgtagaaactgcaagtggatatttggtcctctctgaggatttcgttggaaacgggataaaccgcacagaactaaacagaagaattctcagagccctcttcgtgatgtttgcattcaactcacagtgctgaacctttctttgatagtgcagctttgaaacactctttttgtagaaactgcaagtggatgtttggtcctctctgaggatttcgttggaaacgggataaaccgcacagaactaaaacagaagcattgtcagaaacttctttgtgatgattgcattcaactcacagagttgaaggttccttttcaaacagcagtttccaatcactctttctgtggaatctgcaagtggatatttgggcctctctgaggatttcgttggaaacgggataaaacgcacagaactaaaacagaagcattctcagaaacttctctgtgatgtttgtgttcaactcccagagtttcacgttgcttttcatagagtagttctgaaacatgcttttcgtagtgtctgcaagtggacatttggagcgctttcaggcctgtggtggaaaacgaattatggtcacataaaaactggagagaagccttctcagaaacttctctgtgatgattgcattcaactcacagagttgaaccctcctatggatagagcagtgttgaaactctctttttgtggaatctgcaagtggatatgtggacctctccgaagatgtctttggaaacgggaatatcttcacataaaaactaaacagaagcattctcagaaacttcttggtgatgtttgcattcaaatcccagagttgaaccttcctttgatagttcaggtttgaaacactctttttgtaggatctgcaagtggatatttggaccactctgtggccttcgttcgaaacgggtatatcttcgcataaaatctagacagaagcattctcagaaaatactttgtgatgattgagtttaactcacagagctgaacattcctttggatggagcaggtttgagacacactttttgtagaatctacaagtggatatttggacctctctgaggatttcgttggaaacgggataactgcacctaactaaacggaagcattctcagaaactgctttgtgatgattgcattcacctcacagagttgaacattcctattgatagagcagtttggaaacactcttcttgtggaatgtgcaagtggagatttggagcgctttgaggcctatgggtagtaaagggaatagcttcatagaaaaactagacagatgcattctcaggaactttttggtgatgtttgtattcaactcccagagttgaactttcctttggaaagagcagctatgaaacactgtttttctagaatctgcaagtggacgtttggagggctttgtggtttgtggtggaaaaggaaatatcttcacctaaatactagatagaagcatcctcagaagcttctctgtgatgactgcattcaactcacggagttgaacactccttttgagagcgcagttttgaaactctctttctgtggcatctgcaaggggacatgtagacctctttgaagatttcgttggaaacggaatcatcttcacataaaaactatacagaagcagtctcagaatcttctttgtgatgtttgcattcaaatcccagagttgaactttcctttcaaagttcacgtttgaaacactctttttgcaggatctacaagtggatatttggaccactctgtgtccttcgttcgaaacgggtatatcttcacatgacatctagacagaagctttctcagaaaattctttgggatgattgagtggaactcacagagctgaacattccttgcgatgtagcagtttagaaacacactttctgcagaatctgcaagtgcatatttggacctctccgaggaattcgttggaaacgggataatttcagctgactaaacagaagcattctcagaaccttcttcgtgatgtctgcattcaactcacagtgtggaacctttctttgatagttcaggtttgaaacactctttttgtagaaactgcaaggggataattgcgcttctttgaggcctaccgtagtaaaggaaataacttcctatagaaagaagacagaagcattctcagaaccctcttcgtgatgtttgcattcaacacacagtgctgaacctttctttgatagttcagctttgaaacactcttcttgtagaaactgcaagtggatatttggtcctctctgaggatttcgttggaaacgggataaaccgcacagaactaaacagaagcattctcagaaccttcttcgtgatgtttgcattcaactcacagtgttgaacctttctttgatagttcaggtttgaaacggtctttctgtagaaactgcaagtagatatttggacctctctgaggatttcgttggaaacgggataacccgcacagaactaaaacagatagcattcacagaaaactcttggtgacgactgagtttaactcacagagctgaacattcctttggatggagcagtttcgaaacacactatttgtagaatgtgcaagtggatatttgggcctctctgaggatttcgttggaaacgggataaaccgcacagaactaaacagaagcattctgagaaactactttgtgatgattgcattcaagtcacagagctgaacattccctttgacagagcagtttggaaactctctttgtgtagaatctgcaagtggagatatggaatgctttgaggactatggtagtaaaggaaatagctccatataaaagctagacagtagcattctcagaaacttctttgtgatgcttgcattcaactcacagagttgaactttcctttcgcgagagaagctttgaaacactctttttccagaatctgcaagtggacatttggagggctttgaggcctgtggtggaaaaggaattatcttcccgtaaaagctggatagaagcattgtcagaaacttctttgtgatgattgcattcaactcacagagttgaaggttccttttcaaacagcagtttccaaacactatttctgtggaatctgcaagtggatatttggacctctttgaagatttcgttggaaacgggataaccttcacagaaaagctaaacagaagcattctcagaaacttctctgtgatgtttgtgttcaactcccagagtttcacattgcttttcatagagtagttctgaaacatgcttttcgtagtgtctgcaagtggacatttggagcactttcaggcctgaggtggaaaacgaattatggtcacataaaaactggagagaagccttctcagaaacttctctgtgatgattgcattcaactcacagagttgaaccctcctatggatagagcagtgttgaaactctctttttgtggaatctgcaagtggatatgtggacctctccgaagatgtctttggaaacgggaatatcttcacataaaaactaaacagaagcattctcagaaacttcttggtgatgtttgcattgaaatcccagagttgaaccttcctttgatagttcaggtttgaaacactctttttgtaggatctgcaagtggatatttggaccactctgtggccttcgttcgaaacggctatatcttcgcataaaatctagacagaagcattctcagaaaatactttgtgatgattgagtttaaatcacagagctgaccattcctttggatggagcaggtttgagacacactttttgtagaatctacaagtggatatttggacctctctgaggatttcgttggaaacgggataactgcacctaactaaacggaagcattctcagaaactgctttgtgatgattgcattcacctcacagagttgaacattcctattgatagagcagtttggaaacactcttgttgtggaatgtgcaagtggagatttggagcgctttgaggcctgtggtagtaaagggaatagcttcatagaaaaactagacagatgcattctcaggaaccttttggtgatgtttgtattcaactcccagagttgaactttcctttggaaagagcagctatgaaacactctttttctagaatctgcaagtggacgtttggagggctttgtggtttgtggtggaaaaggaaatatcttcacctaaatactagatagaagcattctcagaagcttctctgtgatgactgcattcaactcacggagttgaacactccttttgagagcgcagttttgaaactctctttctgtggcatctgcaaggggacatgtagacctctttgaagatttcgttggaaacggaatcatcttcacataaaaactatacagaagcagtctcagaatcttctttgtgatgtttgcattcaaatcccagagttgaactttcctttcaaagttcacgtttgaaacactctttttgcaggatctacaagtggatatttggaccactctgtgtccttcgttcgaaacgggtatatcttcacacgacatctagacagaagctttctcagaaaattctttgggatgattgagtggaactcacagagctgaacattccttgcgatgtagcagtttagaaacacactttctgcagaatctgcaagtgcatatttggacctctctgaggaattcgttggaaacgggataatttcagctgactaaacagaagcattctcagaaccttcttcgtgatgtctgcattcaactcacagtgtggaacctttctttgatagttcaggtttgaaacactctttttgtagaaactgcaaggggataattgcacttctttgaggcctaccgtagtaaaggaaataacttcctatagaaagaagacagaagcattctcagaaccctcttcgtgatgtttgcattcaactcacagtgctgaacctttctttgatagttcagctttgaaacactcttcttgtagaaactgcaagtggatatttggtcctctctgaggatttcgttggaaacgggataaaccgcacagaactaaacagaagaattctcagagccctcttcgtgatgtttgcattcaactcacagtgctgaacctttctttgatagtgcagctttgaaacactctttttgtagaaactgcaagtggatgtttggtcctctctgaggatttcgttggaaacgggataaaccgcacagaactaaaacagaagcattgtcagaaacttctttgtgatgattgcattcaactcacagagttgaaggttccttttcaaacagcagtttccaatcactctttctgtggaatctgcaagtggatatttgggcctctctgaggatttcgttggaaacgggataaaacgcacagaactaaaacagaagcattctcagaaacttctctgtgatgtttgtgttcaactcccagagtttcacgttgcttttcatagagtagttctgaaacatgcttttcgtagtgtctgcaagtggacatttggagcgctttcaggcctgtggtggaaaacgaattatggtcacataaaaactggagagaagccttctcagaaacttctctgtgatgattgcattcaactcacagagttgaaccctcctatggatagagcagtgttgaaactctctttttgtggaatctgcaagtggatatgtggacctctccgaagatgtctttggaaacgggaatatcttcacataaaaactaaacagaagcattctcagaaacttcttggtgatgtttgcattcaaatcccagagttgaaccttcctttgatagttcaggtttgaaacactctttctgtaggatctgcaagtggctatttggaccactctgtggccttcgttcgaaacgggtatatcttcgcataaaatctagacagaagcattctcagaaactactttgtgatgattgagttgaactcacagagctgaacattcctttggatggagcaggtttgagacacactttttgtagaatctacaagtggatatttggacctctctgaggatttcgttggaaacgggataactgcacctaactaaacggaagcattctcagaaactgctttgtgatgattgcattcacctcacagagttgaacattcctattgatagagcagtttggaaacactcttgttgtggaatgtgcaagtggagatttggagcgctttgaggcctatggtagtaaagggaatagcttcatagaaaaactagacagatgcattctcaggaactttttggtgatgtttgtattcaactcccagagttgaactttcctttggaaagagcagctatgaaacactctttttctagaatctgcaagtggacgtttggagggctttgtggtttgtggtggaaaaggaaatatcttcacctaaatactagatagaagcattctcagaagcttctctgtgatgactgcattcaactcacggagttgaacactccttttgagagcgcagttttgaaactctctttctgtggcatctgcaaggggacatgtagacctctttgaagatttcgttggaaacggaatcatcttcacataaaaactatacagaagcagtctcagaatcttctttgtgatgtttgcattcaaatcccagagttgaactttcctttcaaagttcacgtttgaaacactctttttgcaggatctacaagtggatatttggaccactctgtgtccttcgttcgaaacgggtatatcttcacacgacatctagacagaagctttctcagaaaattctttgggatgattgagtggaactcacagagctgaacattccttgcgatgtagcagtttagaaacacactttctgcagaatctgcaagtgcatatttggacctctctgaggaattcgttggaaacgggataatttcagctgactaaacagaagcattctcagaaccttcttcgtgatgtctgcattcaactcacagtgtggaacctttctttgatagttcaggtttgaaacactctttttgtagaaactgcaaggggataattgcacttctttgaggcctaccgtagtaaaggaaataacttcctatagaaagaagacagaagcattctcagaaccctcttcgtgatgtttgcattcaactcacagtgctgaacctttctttgatagttcagctttgaaacactcttcttgtagaaactgcaagtggatatttggtcctctctgaggatttcgttggaaacgggataaaccgcacagaactaaacagagcattctcagaaccttcttcgtgatgtttgcattcaactcacagtgttgaacctttctttgatagttcaggtttgaaacggtctttctgtagaaactgcaagtagatatttggacctctctgaggatttcgttggaaacgggataaaccgcacagaactaaaacagaagcattgtcagaaacttctttgtgatgattgcattcaactcacagagttgaaggttccttttcaaacagcagtttccaatcactctttctgtggaatctgcaagtggatatttgggcctctctgaggatttcgttggaaacgggataaaacgcacagaactaaaacagaagcattctcagaaacttctctgtgatgtttgtgttcaactcccagagtttcacgttgcttttcatagagtagttctgaaacatgcttttcgtagtgtctgcaagtggacatttggagcgctttcaggcctgtggtggaaaacgaattatggtcacataaaaactggagagaagccttctcagaaacttctctgtgatgattgcattcaactcacagagttgaaccctcctatggatagagcagtgttgaaactctctttttgtggaatctgcaagtggatatgtggacctctccgaagatgtctttggaaacgggaatatcttcacataaaaactaaacagaagcattctcagaaacttcttggtgatgtttgcattcaaatcccagagttgaactttcctttgatagttcaggtttgaaacactctttctgtaggatctgcaagtggctatttggaccactctgtggccttcgttcgaaacgggtatatcttcgcataaaatctagacagaagcattctcagaaaatactttgtgatgattgagtttaaatcacagagctgaccattcctttggatggagcaggtttgagacacactttttgtagaatctacaagtggatatttggacctctctgaggatttcgttggaaacgggataactgcacctaactaaacggaagcattctcagaaactgctttgtgatggttgcattcacctcacagagttgaacattcctattgatagagcagtttggaaacactcttgttgtggaatgtgcaagtggagatttggagcgctttgaggcctatggtagtaaagggaatagcttcatagaaaaactagacagatgcattctcaggaaccttttggtgatgtttgtattcaactcccagagttgaactttcctttggaaagagcagctatgaaacactctttttctagaatctgcaagtggacgtttggagggctttgtggtttgtggtggaaaaggaaatatcttcacctaaatactagatagaagcattctcagaagcttctctgtgatgactgcattcaactcacggagttgaacactccttttgagagcgtagttttgaaactctctttctgtggcatctgcaaggggacatgtagacctctttgaagatttcgttggaaacggaatcatcttcacataaaaactatacagaagcagtctcagaatcttctttgtgatgtttgcattcaaatcccagagttgaactttcctttcaaagttcacgtttgaaacactctttttgcaggatctacaagtggatatttggaccactctgtgtccttcgttcgaaacgggtatatcttcacacgacatctagacagaagctttctcagaaaattctttgggatgattgagtggaactcacagagctgaacattccttgcgatgtagcagtttagaaacacactttctgcagaatctgcaagtgcatatttggacctctctgaggaattccgttggaaacgggataatttcagctgactaaacagaagcattctcagaaccttcttcgtgatgtctgcattcaactcacagtgtggaacctttctttgatagttcaggtttgaaacactctttttgtagaaactgcaaggggataattgcacttctttgaggcctaccgtagtaaaggaaataacttcctatagaaagaagacagaagcattctcagaaccctcttcgtgatgtttgcattcaactcacagtgctgaacctttctttgatagttcagctttgaaacactcttcttgtagaaactgcaagtggatatttggtcctctctgaggatttcgttggaaacgggataaaccgcacagaactaaacagaagaattctcagagccctcttcgtgatgtttgcattcaactcacagtgctgaacctttctttgatagtgcagctttgaaacactctttttgtagaaactgcaagtggatgtttggtcctctctgaggatttcgttggaaacgggataaaccgcacagaactaaaacagaagcattgtcagaaacttctttgtgatgattgcattcaactcacagagttgaaggttccttttcaaacagcagtttccaatcactctttctgtggaatctgcaagtggatatttgggcctctctgaggatttcgttggaaacgggataaaacgcacagaactaaaacagaagcattctcagaaacttctctgtgatgtttgtgttcaactcccagagtttcacgttgcttttcatagagtagttctgaaacatgcttttcgtagtgtctgcaagtggacatttggagcgctttcaggcctgtggtggaaaacgaattatggtcacataaaaactggagagaagccttctcagaaacttctctgtgatgattgcattcaactcactgagttgaaccctcctattggatagagcagtgttgaaactctctttttgtggaatctgcaagtggatatgtggacctctccgaagatgtctttggaaacgggaatatcttcacataaaaactaaacagaagcattctcagaaacttcttggtgatgtttgcattcaaatcccagagttgaaccttcctttgatagttcaggtttgaaacactctttttgtaggatctgcaagtggctatttggaccactctgtggccttcgttcgaaacgggtatatcttcgcataaaatctagacagaagcattctcagaaaatactttgtgatgattgagtttaaatcacagagctgaccattcctttggatggagcaggtttgagacacactttttgtagaatctacaagtggatatttggacctctctgaggatttcgttggaaacgggataactgcacctaactaaacggaagcattctcagaaactgctttgtgatgattgcattcacctcacagagttgaacattcctattgatagagcagtttggaaacactcttgttgtggaatgtgcaagtggagatttggagcgctttgaggcctatggtagtaaagggaatagcttcatagaaaaaattgacagatgcattctcaggaactttttggtgatgtttgtattcaactcccagagttgaactttcctttggaaagagcagctatgaaacactctttttctagaatctgcaagtggacgtttggagggctttgtggtttgtggtggacaaggaaatatcttcacctaaatactagatagaagcattctcagaagcttctctgtgatgactgcattcaactcacggagttgaacactccttttgagagcgcagttttgaaactctctttctgtggcatctgcaaggggacatgtagacctctttgaagatttcgttggaaacggaatcatcttcacataaaaactatacagaagcagtctcagaatcttctttgtgatgtttgcattcaaatcccagagttgaacttccctttcaaagttcacgtttgaaacactctttttgcaggatctacaagtggatatttggaccactctgtgtccttcgttcgaaacgggtatatcttcacatgacatctagacagaagctttctcagaaaattctttgggatgattgagtggaactcacagagctgaacattccttgcgatgtagcagtttagaaacacactttctgcagaatctgcaagtgcatatttggacctctctgaggaattcgttggaaacgggataatttcagctgactaaacagaagcattctcagaaccttcttcgtaatgtctccattcaactcacagtgtggaacctttctttgatagttcaggtttgaaacactctttttgtagaaactgcaaggggataattgcacttctttgaggcctaccgtagtaaaggaaataacttcctatagaaagaagacagaagatttctcagaaccctcttcgtgatgtttgcattcaactcacagtgctgaacctttctttgatagttcagctttgaaacactcttcttgtagaaactgcaagtggatatttggtcctctctgaggatttcgttggaaacgggataaaccgcacagaactaaacagaagatttctcagagccctcttcgtgatgtttgcattcaactcacagtgctgaacctttctttgatagtgcagctttaaaacactctttttgtagaaactgcaagtggatatttggtcctctctgaggatttcgttggaaacggaataaaccgcacagaacaaaaacagaagcattcacagaaaacacttggtgacgactgagtttaactcacagagctgaacattcctttggatggagcagtttcgaaacacactatttgtagaatctgcaagtggatatttgggcctctctgaggatttcgttggaaacgggataaaacgcacagaactaaaacagaagcattctcagaaactactttgtgatgattgcattcaagtcacagagttgaacattccctttgacagagcagtttggaaactctctttgtgtagaatctgcaagtggagatatggaccgctttgaggcctatggtagtaaaggaaatagcttcatataaaagctagacagtagcattctcagaaacttctttgtgatgcttgcattcaactcacagagttgaactttcctttcgagagagaagctttgaaacactctttttccagaatgtgcaagtggacatttggggagctttgaggcctgtggtggaaaaggaattatcttcccgtaaaagctagatagaagcattgtcagaaacttctttgagatgattgcattcaactcacagagttgaaggttccttttcaaacagcagtttccaatcactctttctgtggaatctgcaagtggatatttcgacctctttgaagatttcgttggaaacgggagaatcttcacagaaaagctaaacagaagcattctcagaaacttctctgtgatgtttgtgttcaactcccagagtttcacgttgcttttcatagagtagttctgaaacatgcttttcgtagtgtctgcaagtggacatttggagcgctttcaggcctgtggtggaaaacgaattatggtcacataaaaactggagagaagccttctcagaaacttttctgtggtgattgcattcaactcacagagttgaaccctcctatggatagagcagtgttgaaactctctttttgtggaatctgcaagtggatatgtggacctctccgaagatgtctttggaaacgggaatatcttcacataaaaactaaacagaagcattctcagaaacttcttggtgatgtttgcattcaaatcccagagttgaaccttcctttgatagttcaggtttgaaacactctttttgtaggatctgcaagtggatatttggaccactctgtggccttcgttcgaaacgggtatatcttcgcataaaatctagacagaagcattctcagaaaatactttgtgatgattgagtttaactcacagagctgaacattcctttggatggagcaggtttgagacacactttttgtagaatctacaagtggatatttggacctctctgaggatttcgttggaaacgggataactgcacctaactaaacggaagcattctcagaaactgctttgtgatgattgcattcacctcacagagttgaacattcctattgatagagcagtttggaaacactcttgttgtggaatgtgcaagtggagatttggagcgctttgaggcctatggtagtaaagggaatagcttcatagaaaaactagacagatgcattctcaggaacattttggtgatgtttgtattcaactcccagagttgaactttcctttggaaagagcagctatgagacactgtttctctagaatctgcaagtggacgtttggagggctttgtggtttgtggtggaaaaggaaatatcttcacctaaatactagatagaagcattctcagaagcttctctgtgatgactgcattcaactcacggagttgaacactccttttgagagcgcagttttgaaactctctttctgtggcatctgcaaggggacatgtagacctctttgaagatttcgttggaaacggaatcatcttcacataaaaactatacagaagcagtctcagaatcttctttgtgatgtttgcattcaaatcccagagttgaactttcctttcaaagttcacgtttgaaacactctttttgcaggatctacaagtggatatttggaccactctgtgtccttcgttcgaaacgggtatatcttcacacgacatctagacagaagctttctcagaaaattctttgggatgattgagtggaactcacagagctgaacattccttgcgatgtagcagtttagaaacacactttctgcagaatctgcaagtgcatatttggacctctctgaggaattcgttggaaacgggataatttcagctgactaaacagaagcattctcagaaccttcttcgtgatgtctgcattcaactcacagtgtggaacctttctttgatagttcaggtttgaaacactctttttgtagaaactgcaaggggataattgcacttctttgaggcctaccgtagtaaaggaaataacttcctatagaaagaagacagaagcattctcagaaccctcttcgtgatgtttgcattcaactcacagtgctgaacctttctttgatagttcagctttgaaacactcttcttgtagaaactgcaagtggatatttggtcctctctgaggatttcgttggaaacgggataaaccgcacagaactaaacagaagaattctcagagccctcttcgtgatgtttgcattcaactcacagtgctgaacctttctttgatagtgcagctttgaaacactctttttgtagaaactgcaagtggatgtttggtcctctctgaggatttcgttggaaacgggataaaccgcacagaactaaaacagaagcattgtcagaaacttctttgtgatgattgcattcaactcacagagttgaaggttccttttcaaacagcagtttccaatcactctttctgtggaatctgcaagtggatatttgggcctctctgaggatttcgttggaaacgggataaaacgcacagaactaaaacagaagcattctcagaaacttctctgtgatgtttgtgttcaactcccagagtttcacgttgcttttcatagagtagttctgaaacatgcttttcgtagtgtctgcaagtggacatttggagcgctttcaggcctgtggtggaaaacgaattatggtcacataaaaactggagagaagccttctcagaaacttctctgtgatgattgcattcaactcacagagttgaaccctcctatggatagagcagtgttgaaactctctttttgtggaatctgcaagtggatatgtggacctctccgaagatgtctttggaaacgggaatatcttcacataaaaactaaacagaagcattgtcagaaacttcttggtgatgtttgcattcaaatcccagagttgaaccttcctttgatagttcaggtttgaaacactctttctgtaggatctgcaagtggctatttggaccactctgtggccttcgttcgaaacgggtatatcttcgcataaaatctagacagaagcattctcagaaaatactttgtgatgattgagttgaactcacagagctgaacattcctttggatggagcagttttgagacacacttcttgtagaatctacaagtggatatttggacctctctgaggatttcgttggaaacgggataactgcacctaactaaacggaagcattctcagaaactgctttgtgatgattgcattcacctcacagagttgaacattcctattgatagagcagtttggaaacactcttgttgtggaatgtgcaagtggagatttggagcgctttgaggcctatggtagtaaagggaatagcttcatagaaaactagacagatgcattctcaggaactttttggtgatgtttgtattcaactcccagagttgaactttcctttggaaagagcagctatgaaacactctttttctagaatctgcaagtggacgtttggagggctttgtggtttgtggtggaaaaggaaatatcttcacctaaatactagatagaagcattctcagaagcttctctgtgatgactgcattcaactcacggagttgaacactccttttgagagcgcagttttgaaactctctttctgtggcatctgcaaggggacatgtagacctctttgaagatttcgttggaaacggaatcatcttcacataaaaactatacagaagcagtctcagaatcttctttgtgatgtttgcattcaaatccccgagttgaactttcctttcaaagttcacgtttgaaacactctttttgcaggatctacaagtggatatttggaccactctgtgtccttcgttcgaaacgggtatatcttcacatgacatctagacagaagctttctcagaaaattctttgggatgattgagttgaactcacagagctgagcattccttgcgatgtagcagtttagaaacacactttctgcagaatctgcaagtgcatatttggacctctgtgaggaattcgttggaaacgggataatttcagctgactaaacagaagcattctcagaaccttcttcgtgatgtctgcattcaactcacagtgtggaacctttctttgatagttcaggtttgaaacactctttttgtagaaactgcaaggggatcattgcactctttgaggagtaccgtagtaaaggaaataacttcctataaaaagaagacagaagcattctcagaaccctcttcgtgatgtttgcattcaactcacagtgctgaacctttctttgatagttcagctttgaaacactctttttgtagaaactgcaagtggatatttggtcctctctgagcatttcgttggaaacgggataaactgcacagaactaaacagaagcattctcagaaccttcttcgtgatgtttgcattcaactcacagtgttgaacctttctttgatagttcaggtttgaaacggtctttctgtagaaactgcaagtagatatttggacctctctgaggatttcgttggaaacgggataacccgcacagaactaaaacagaagcattcacagaaaacccttggtgacgactgagtttaactcacagagctgaacattcctttggatggagcagtttcgaaacacactaattgtagaatgtgcaagtggatatttgggcctctctgaggatttcgttggaaacgggataaaccgcacagaactaaacagaagcattctcagaaactactttgtgatgattgcattcaagtcacagagttgaacattccctttgacagagcagtttggaaactctctttgtgtagaatctgcaagtggagatatggaccgctttgaggcctatggtagtaaaggaaatagcttcatataaaagctagacagtagcattctcagaaacttctttgtgatgcttgcattcaactcacagagttgaactttcctttcgagagagaagctttgaaacactctttttccagaatctgcaagtggacatttggagggctttgaggcctgtggtggaaaaggaattatcttcccgtaaaagctagatagaagccttctcagaaacttctctgtgatgattgcattcaactcacagagttgaaggttccttttcaaagagcagtttccaatcactctttctgtggaatctgcaagtggatatttggacctattttgaagatttcgttggaaacgggagaatcttcacaggaaagctaaacagaagcattctcagaaacttcttggtgatgtttgcattcaaatcccagagtagaaccttcctttgatagttcaggtttgaaacactctttttgtaggatctgcaagtggatatttggaccactctgtggccttcgttcgaaacgggtatatcttcgcataaaatctagacagaagcattctcagaaaatactttgtgatgattgagtttaactcacagagctgaacattcctttggatggagcaggtttgagacacactttttgtagaatctacaagtggatatttggacctctgctgaggatttcgttggaaacgcgataactgcacctaactaaacggaagcattctcagaaactgctttgtgatgattgcattcacctcacagagttgaacattcctattgatagagcagtttggaaacactcttgttgtggaatgtgcaagtggagatttggagcgctttgaggcctatggtagtaaagggaatagcttcatagaaaaactagacagatgcattctcaggaactttttggtgatgtttgtattcaactcccagagttgaactttcctttggaaagagcagctatgaaacactgtttttctagaatctgcaagtggacgtttggagggctttgtggtttgtggtggaaaaggaaatatcttcacctaaatactagatagaagcatcctcagaagcttctctgtgatgactgcattcaactcacggagttgaacactccttttgagagcgcagttttgaaactctctttctgtggcatctgcaaggggacatgtagacctctttgaagatttcgttggaaacggaatcatcttcacataaaaactatacagaagcagtctcagaatcttctttgtgatgtttgcattcaaatccccgagttgaactttcctttcaaagttcacgtttgaaacactctttttgcaggatctacaagtggatatttggaccactctgtgtccttcgttcgaaacggatatatcttcacatgacatctagacagaagctttctcagaaaattctttgggatgattgagttgaactcacagagctgagcattccttgcgatgtagcagtttagaaacacactttctgcagaatctgcaagtgcatatttggacctctgtgaggaattcgttggaaacgggataatttcagctgactaaacagaagcattctcagaaccttcttcgtgatgtctgcattcaactcacagtgtggaacctttctttgatagttcaggtttgaaacactctttctgtagaaactgcaaggggataattgcactctttgaggagtaccgtagtaaaggaaataacttcctataaaaagaagacagaagcattctcagaaccctcttcgtgatgtttgcattcaactcacagtgctgaacctttctttgatagttcagctttgaaacactctttttgtagaaactgcaagtggatatttggtcctctctgaggatttcgttggaaacgggataaactgcacagaactaaacagaagcattctcagaaccttcttcgtgatgtttgcattcaactcacagtgttgaacctttctttgatagttcaggtttgaaacggtctttctgtagaaactgcaagtagatatttggacctctctgaggatttcgttggaaacgggataacccgcacagaactaaaacagaagcattcacagaaaactcttggtgacgactgagtttaactcacagagctgaacattcctttggatggagcagtttcgaaacacactatttgtagaatgtgcaagtggatatttaggcctctctgaggatttcgttggaaacgggataaaccgcacagaactaaacagaagcattctcagaaactactttgtgatgattgcattcaagtcacagagttgaacattccctttgacagagcagtttggaaactctctttgtgtagaatctgcaagtggagatatggaccgctttgaggcctatggtagtaaaggaaatagcttcatataaaagctagacagtagcattctcagaaacttctttgtgatgcttgcattcaactcacagagttgaactttcctttcgagagagaagctttgaaacactctttttccagaatctgcaagtggacatttggagggctttgaggcctgtggtggaaaaggaattatcttcccgtaaaagctagatagaagcattgtcagaaacttctttgtgatgattgcattcaactcacagagttgaaggttccttttcaaagagcagtttccaatcactctttctgtggaatctgcaagtggatatttggacctctttgaagatttcgttggaaacgggagaatcttcacaggaaagctaaacagaagcattctcagaaacttctctgtgatgtttgtgttcaactcccagagtttcacattgcttctcatagagtagttctgaaacatgcttttcgtagtgtctacaagtggacatttggagcgctttcaggcctgtggtggaaaacgaattatggtcccataaaaactggagagaagccttctcagaaacttctctgtgatgattgcattcaactcacagagttgaaccctcctatggatagagcagtgttgaaactctctttttgtggaatctgcaagtggatatgtggacctctccgaagatgtctttggaaacgggaatatcttcacataaaaactaaacagaagcattctcagaaacttcttggtgatgtttgcattcaaatcccagagttgaaccttcctttgatagttcaggtttgaaacactctttttgtaggatctgcaagtggatatttggaccactctgtggccttcgttcgaaacgggtatatcttcgcataaaatctagacagaagcattctcagaaaatactttgtgatgattgagtttaactcacagagctgaacattcctttggatggagcaggtttgagacacaccttttgtagaatctacaagtggatatttggacctctctgaggatttcgttggaaacgggataactgcacctaactaaacggaagcattctcagaaactgctttgtgatgattgcattcacctcacagagttgaacattcctattgatagagcagtttggaaacactcttgttgtggaatgtgcaagtggagatttggagcgctttgaggcctatggtagtaaagggaatagcttcatagaaaaactagacagatgcattctcaggaactttttggtgatgtttgtattcaactcccagagttgaactttcctttggaaagagcagctatgaaacactctttttctagaatctgcaagtggacgtttggagggctttgtggtttgtggtggaaaaggaaatatcttcacctaaatactagatagaagcatcctcagaagcttctctgtgatgactgcattcaactcacggagttgaacactccttttgagagcgcagttttgaaactctctttctgtggcatctgcaaggggacatgtagacctctttgaagatttcgttggaaacggaatcatcttcacataaaaactatacagaagcagtctcagaatcttctttgtgatgtttgcattcaaatccccgagttgaactttcctttcaaagttcacgtttgaaacactctttttgcaggatctacaagtggatatttggaccactctgtgtccttcgttcgaaacgggtatatcttcacatgacatctagacagaagctttctcagaaaattctttgggatgattgagttgaactcacagagctgagcattccttgcgatgtagcagtttagaaacacactttctgcagaatctgcaagtgcatatttggacctctgtgaggaattcgttggaaacgggataatttcagctgactaaacagaagcattctcagaaccttcttcgtgatgtctgcattcaactcacagtgtggaacctttctttgatagttcaggtttgaaacactctttttgtagaaactgcaaggggataattgcactctttgaggagtaccgtagtaaaggaaataacttcctataaaaagaagacagaagcattctcagaaccctcttcgtgatgtttgcattcaactcacagtgctgaacctttctttgatagttcagctttgaaacactctttttgtagaaactgcaagtggatatttggtcctctctgaggatttcgttggaaacgggataaactgcacagaactaaacagaagcattctcagaaccttcttcgtgatgtttgcattcaactcacagtgttgaacctttctttgatagttcaggtttgaaacggtctttctgtagaaactgcaagtagatatttggacctctctgaggatttcgttggaaacgggataacccgcacagaactaaaacagaagcattcacagaaaactcttggtgacgactgagtttaactcacagagctgaacattcctttggatggagcagtttcgaaacacactatttgtagaatgtgcaagtggatatttaggcctctctgaggatttcgttggaaacgggataaaccgcacagaactaaacagaagcattctcagaaactactttgtgatgattgcattcaagtcacagagttgaacattccctttgacagagcagtttggaaactctctttgtgtagaatctgcaagtggagatatggaccgctttgaggcctatggtagtaaaggaaatagcttcatataaaagctagacagtagcattctcagaaacttctttgtgatgcttgcattcaactcacagagttgaactttcctttcgagagagaagctttgaaacactctttctccagaatctgcaagtggacatttggagggctttgaggcctgtggtggaaaaggaattatcttcccgtaaaagctagatagaagcattgtcagaaacttctttgtgatgattgcattcaactcacagagttgaaggttccttttcaaacagcagtttccaatcactctttctgtggaatctgcaagtggatatttggacctattttgaagatttcgttggaaacgggagaatcttcacagaaaagctaaacagaagcattctcagaaacttctctgtgatgtttgtgttcaactcccagagtttcacattgcttttcatagagtagttctgaaacatgcttttcgtagtgtctgcaagtggacatttggagcgctttcaggcctgtggtggaaaacgaattatggtcacataaaaactggagagaagccttctcagaaacttctctgtgatgattgcattcaactcacagagttgaaccctcctatggatagagcagtgttgaaactctctttttgtggaatctgcaagtggatatgtggacctctccgaagatgtctttggaaacgggactatcttcacataaaaactaaacagaagcattctcagaaacatcttggtgatgtttgcattcaaatcccagagttgaaccttcctttgatagttcaggtttgaaacactctttttgtaggatctgcaagtggatatttggaccactctgtggccttcgttcgaaacgggtacatcttcgcataaaatctagacagaagcattctcagaaaatactttgtgatgattgagtttaactcacagagctgaacattcctttggatggagcaggtttgagacacactttttgtagtatctacaagtggatatttggacctctctgaggatttcgttggaaacgggataactgcacctaactaaacggaagcattctcagaaactgctttgtgatgattgcattcacctcacagagttgaacattcctattgatagagcagtttggaaacactcctgttgtggaatgtgcaagtggagatttggagcgctttgaggcctatggttgtaaagggaatagcttcatagaaaaactaaacagatgcattctcaggaactttttggtgatgtttgtattcaactcccagagttgaactttcctttggaaagagcagctatgaaacacgctttttctagaatctgcaagtggacgtttggagggctttgtggtttgtggtctaaaaggaaatatcttcacctaaatactagatagaagcattctcagaagcttctctgtgatgactgcattcaactcacggagttgaacactccttttgagagcacagttttgaaactctctttatgtggcatctgcaaggggacatgtagacctctttgaagatttcgttggaaacggaatcatcttcatataaaaactatacagaagcagtctcagaatcttctttgtgatgtttgcattcaaatcccagaattgaactttcctttcaaagttcacgtttgaaacactctttttgcagggtctacaagtggatatttggaccactctgtgtccttcgttcgaaacgggtatatcttcacatgacatctagacagaagcattcacagaaaactcttggtgacgactgagtttaactcacagagctgaacattcctttggatggagcagtttagaaacacactttctgcagaatctgcaagtgcatatttggacctctctgaggaattcgttggaaacgggataatttcagctgactaaacagaagcattctcagaaccttcttcgtgatgtctgcattcaactcacagtgtggaacctttctttgatagttcaggtttgaaacactctttttgtagaaactgcaaggggataattgcacttctttgaggcctaccgtagtaaaggaaataacttcctatagaaagaagacagaagcattctcagaaccctcttcgtgatgtttgcattcaactcacagtgctgaacctttctttgatagttcagctttgaaacactcttcttgtagaaactgcaagtggatatttggtcctctctgaggatttcgttggaaacgggataaaccgcacagaactaaacagaagaattctcagagccctcttcgtgatgtttgcattcaactcacagtgctgaacctttctttgatagtgcagctttgaaacactctttttgtagaaactgcaagtggatgtttggtcctctctgaggatttcgttggaaacgggataaaccgcacagaactaaaacagaagcattgtcagaaacttctttgtgatgattgcattcaactcacagagttgaaggttccttttcaaacagcagtttccaatcactctttctgtggaatctgcaagtggatatttgggcctctctgaggatttcgttggaaacgggataaaacgcacagaactaaaacagaagcattctcagaaacttctctgtgatgtttgtgttcaactcccagagtttcacgttgcttttcatagagtagttctgaaacatgcttttcgtagtgtctgcaagtggacatttggagcgctttcaggcctgtggtggaaaacgaattatggtcacataaaaactggagagaagccttctcagaaacttctctgtgatgattgcattcaactcacagagttgaaccctcctatggatagagcagtgttgaaactctctttttgtggaacctgcaagtggatatgtggacctctccgaagatgtctttggaaacgggaatatcttcacataaaaactaaacagaagcattctcagaaacttcttggtgatgtttgcattcaaatcccagagttgaaccttcctttgatagttcaggtttgaaacactctttctgtaggatctgcaagtggctatttggaccactctgtggccttcgttcgaaacgggtatatcttcgcataaaatctagacagaagcattctcagaaaatactttgtgatgattgagtttaaatcacagagctgaccattcctttggatggagcaggtttgagacacactttttgtagaatctacaagtggatatttggacctctctgaggatttcgttggaaacgggataactgcacctaactaaacggaagcattctcagaaactgctttgtgatgattgcattcacctcacagagttgaacattcctattgatagagcagtttggaaacactcttgttgtggaatgtgcaagtggagatttggagcgctttgaggcctatggtagtaaagggaatagcttcatagaaaaactagacagatgcattctcaggaactttttggtgatgtttgtattcaactcccagagttgaactttcctttggaaagagcagctatgaaacactctttttctagaatctgcaagtggacgtttggagggctttgtggtttgtggtggaaaaggaaatatcttcacctaaatactagatagaagcattctcagaagcttctctgtgatgactgcattcaactcacggagttgaacactccttttgagagcgcagttttgaaactctctttctgtggcatctgcaaggggacatgtagacctctttgaagatttcgttggaaacggaatcatcttcacataaaaactatacagaagcagtctcagaatcttctttgtgatgtttgcattcaaatcccagagttgaactttcctttcaaagttcacgtttgaaacactctttttgcaggatctacaagtggatatttggaccactctgtgtccttcgttcgaaacgggtatatcttcacacgacatctagacagaagctttctcagaaaattctttgggatgattgagtggaactcacagagctgaacattccttgcgatgtagcagtttagaaacacactttctgcagaatctgcaagtgcatatttggacctctctgaggaattcgttggaaacgggataatttcagctgactaaacagaagcattctcagaaccttcttcgtgatgtctgcattcaactcacagtgtggaacctttctttgatagttcaggtttgaaacactctttttgtagaaactgcaaggggataattgcacttctttgaggcctaccgtagtaaaggaaataacttcctatagaaagaagacagaagcattctcagaaccctcttcgtgatgtttgcattcaactcacagtgctgaacctttctttgatagttcagctttgaaacactcttcttgtagaaactgcaagtggatatttggtcctctctgaggatttcgttggaaacgggataaaccgcacagaactaaacagaagaattctcagagccctcttcgtgatgtttgcattcaactcacagtgctgaacctttctttgatagtgcagctttgaaacactctttttgtagaaactgcaagtggatgtttggtcctctctgaggatttcgttggaaacgggataaaccgcacagaactaaaacagaagcattgtcagaaacttctttgtgatgattgcattcaactcacagagttgaaggttccttttcaaacagcagtttccaatcactctttctgtggaatctgcaagtggatatttgggcctctctgaggatttcgttggaaacgggataaaacgcacagaactaaaacagaagcattctcagaaacttctctgtgatgtttgtgttcaactcccagagtttcacgttgcttttcatagagtagttctgaaacatgcttttcgtagtgtctgcaagtggacatttggagcgctttcaggcctgtggtggaaaacgaattatggtcacataaaaactggagagaagccttctcagaaacttctctgtgatgattgcattcaactcacagagttgaaccctcctatggatagagcagtgttgaaactctctttttgtggaatctgcaagtggatatgtggacctctccgaagatgtctttggaaacgggaatatcttcacataaaaactaaacagaagcattctcagaaacttcttggtgatgtttgcattcaaatcccagagttgaaccttcctttgatagttcaggtttgaaacactctttctgtaggatctgcaagtggctatttggaccactctgtggccttcgttcgaaacgggtatatcttcgcataaaatctagacagaagcattctcagaaaatactttgtgatgattgagtttaaatcacagagctgaccattcctttggatggagcaggtttgagacacactttttgtagaatctacaagtggatatttggacctctctgaggatttcgttggaaacgggataactgcacctaactaaacggaagcattctcagaaactgctttgtgatgattgcattcacctcacagagttgaacattcgtattgatagagcagtttggaaacactcttcttgtggaatgtgcaagtggagatttggagcgctttggggcctatggtagtaaagggaatagcttcatagaaaaactagacagatgcattatcaggaactttttggtgatgtttgtattcaactcccagagttgaactttcctttggaaagagcagctatgaaacactctttttctagaatctgcaagtggacgtttggacggctttgtggtttgtggtggaaaaggaaatatcttcacctaaatactagatagaagcattctcagaagcttctctgtgatgactgcattcaactcacggagttgaacactccttttgagagcgcagttttggaactctctttctgtggcatctgcaaggggacatgtagacctctttgaagatttcgttggaaacggaatcatcttcacatcaaaactatacagaagcagtctcagaatcttctttgtgatgtttgcattcaaatcccagagttgaacttgcctttcaaagttcacgtttgaaacactctttttgcaggatctacaagtggatatttggaccactctgtgtccttcgttcgaaacgggtatatcttcacatgacatctagacagaagctttctcagaaaattctttgtgatgattgagttgagcaaacagagctgaacactccttgcgatgtagcagtttagaaacacactttctgcagaatctgcaagtgcatatgtggacctctctgaggaattcgttggaaacgggataatttcagctgactaaacagaagcattctcagaaccttcttcgtgatgtctgcattcaactcacagtgtggaacctttctttgatagttcaggtttgaaacactctttttgtagaaactgcaaggggatcattgcacttctttgaggcctaccgtagtaaaggagataacttcctataaaaagaagacagaagcattctcagaaccctcttcgtgatgtttgcattcaactcacggtgctgaacctttctttgatagttcagctttgaaacactctttttgtagaaactgcaagtggatatttggtcctctctgaggatttcgttggaaacgggataaaccgcacagaactaaacagaagcattctcagaaccttcttcgtgatgtttgcattcaactcacagtgttgaacctttctttgatagttcaggtttgaaacggtctttctgtagaaactgctagtagatatttggacctctctgaggatttcgttggaaacgggataaagcgcacacaactaaaacagaagcattcacagaaaactcttggtgacgactgagtttaacacacagagctgaacattcctttggatggagcagtttcgaaacacactatttgtagaatgtgcaagtggatattggggcctctctgaggatttcgttggaaacgggataaaccgcacagaactaaacagaagcattctcagaaactactttgtgatgattgcattcaagtcacagagttgaacattccctttgacagagcagtttggaaactctctttgtgtagaatctgcaagtggagatatggaccgctttgaggcctatggtagtaaaggaaatagcttcatataaaagctagacagtagcattctcagaaacttctttgtgatgcttgcattcaactcacagagttgaactttcctttcgagagagaagctttgaaacactctttttccagaatctgcaagtggacatttggagggctttgaggcctgtggtggaaaaggaattatcttcccgtaaaagctagatagaagcattgtcagaaacttctttgtgatgattgcattcaactcacagagttgaaggttccttttcaaagagcagtttccaatcactctttctgtggaatctgcaagtggatatttggacctattttgaagatttcgttggaaacgggagaatcttcacaggaaagctaaacagaagcattctcagaaacttctctgtgatgtttgtgttcaactcccagagtttcacattgcttttcatagagtagttctgaaacatgcttttcgtagtgtctacaagtggacatttggagcgctttcaggcctgtggtggaaaacgaattatggtcacataaaaactggagagaagccttctcagaaacttctctgtgatgattgcattcaactcacagagttgaaccctcctatggatagagcagtgttgaaactctctttttgtggaatctgcaagtgaatatgtggacctatccgaagatgtctttggaaacgggaatatcttcacataaatactaaacagaagcattctcagaaacttcttggtgatgtttgcattcaaatcccagagttgaaccttcctttgatagttcaggtttgaaacactctttttgtaggatctgcaagtggatatttggaccactctgtggccttcgttcgaaacgggtatatcttcgcataaaatctagacagaagcattctcagaaaatactttgtgatgattgagtttaactcacagagctgaacattcctttggatggagcaggtttgagacacaccttttgtagaatctacaagtggatatttggacctctctgaggatttcgttggaaacgggataactgcacctaactaaacggaagcattctcagaaactgctttgtgatgattgcattcacctcacagagttgaacattcctattgatagagcagtttggaaacactcttgttgtggaatgtgcaagtggagatttggagcgctttgaggcctatggtagtaaagggaatagcttcatagaaaaactagacagatgcattctcaggaactttttggtgatgtttgtattcaactcccagagttgaactttcctttggaaagagcagctatgaaacactgtttttctagaatctgcaagtggacgtttggagggctttgtggtttgtggtggaaaaggaaatatcttcacctaaatactagatagaagcatcctcagaagcttctctgtgatgactgcattcaactcacggagttgaacactccttttgagagcgcagttttgaaattctctttctgtggcatctgcaaggggacatgtagacctctttgaagatttcgttggaaacggaatcatcttcacataaaaactatacagaagcagtctcagaatcttctttgtgatgtttgcattcaaatccccgagttgaactttcctttcaaagttcacgtttgaaacactctttttgcaggatctacaagtggatatttggaccactctgtgtccttcgttcgaaacgggtatatcttcacatgacatctagacagaagctttctcagaaaattctttgggatgattgagttgaactcacagaggtgagcattccttgcgatgtagcagtttagaaacacactttctgcagaatctgcaagtgcatatttggacctctgtgaggaattcgttggaaacgggataatttcagctgactaaacagaagcattctcagaaccttcttcgtgatgtctgcattcaactcaaagtgtggaacctttctttgatagttcaggttttaaaaactctttttgtagaaactgcaaggggataattgcactctttgaggattaccgtagtaaaggaaataacttcctataaaaagaagacagaagcattctcagaaccctcttcgtgatgtttgcattcaactcacagtgctgaacctttctttgatagttcagctttgaaacactctttttgtaaaaactgcaagtgaatatttggtcctctctgaggatttcgttggaaacgggataaaacgcacagaactaaacagaagcattctcagaaccttcttcgtgatgtttgcattcaactcacagtgttgaacctttctttgatagttcaggtttgaaacggtctttctgtagaaactgcaagtagatatttggacctctctgaggatttcgttggaaacgggataaaccgcacagaactaaaacagaagcattcacagaaaactcttggtgacgactgagtttaactcacagagctgaacatccctttggatggagcagtttcgaaacacactatttgtagaatgtgcaagtggatattggggcctctctgaggatttcgttggaaacgggataaaccgcacagaattaaacagaagcattctcagaaattactttggatgattgcattcaagtcacagagttgaacattccctttgacagagcagtttggaaactctctttgtgtagaatctgcaagtggagatatggaccgctttgaggcctatggtagtaaaggaaatagcttcatataaaagctagacagtagcattctcagaaacttctttgtgatgcttgcattcaactcacagagttgaactttcctttcgagagagaagctttgaatcactctttttccagaatgtgcaagtggacatttggggagctttgaggcctgtggtggaaaaggaattatcttcccgtaaaagctagatagaagcattgtcagaaacttctttgtgatgattgcattcaactcacagaattgaaggttccttttcaaacagcagtttccaatcactctttctgtggaatctgcaagtggatatttcgacctctttgaagatttcgttggaaacgggagaatcttcacagaaaagctaaacagaagcattctcagaaacttctctgtgatgtttgtgttcaactcccagcagtttcacattgcttttcatagagtagttctgaaacatgcttttcgtagtgtctgcaagtggacatttggagcgctttcaggcctgtggtggaaaacgaattatggtcccataaaaactggagagaagacttctcagaaacttctctgtgatgattgcattcaactcaccgatttgaaccctcctatggatagagcattgttgaaactctctttttgtggaatctgcaagtggatatgtggacctctccgaagatgtctttggaaacgggaatatcttcacataaaaactaaacagaagcattctcagaaacttcttggtgatgtttgcattcaaatcccagagttgaaccttcctgtgatagttcaggtttgaaacactctttttgtaggatctgcaagtggatatttggaccactctgtggccttcgttcgaaacgggtacatcttcacataaaatctagacagaagcattctcagaaaatactttgtgatgattgagtttaactcacagagctgaacattcctttggatggagcaggtttgagacacactttttgtagaatctacaagtggatatttggacctctctgaggatttcgttggaaacgcgataactgcacctaactaaacggaagcattctcagcaaactgctttgtgatgattgcattcacctcacagagttgaacattcctattgatagagcagtttggaaacactcttgttgtggaatgtgcaagtggagatttggagcgctttgaggcctatggtagtaaagggaatagcttcatagaaaaactagacagatgcattctcaggaactttttggtgatgtttgtattcaactcccagagttgaactttcctttggaaagagcagctatgaaacactgtttttctagaatctgcaagtggacgtttggagggctttgtggtttgtggtggaaaaggaaatatcttcacctaaatactagatagaagcatcctcagaagcttctctgtgatgactgcattcaactcacggagttgaacactccttttgagagcgcagttttgaaactctctttctgtggcatctgcaaggggacatgtagacctctttgaagatttcgttggaaacggaatcatcttcacataaaaactacacagaagcagtctcagaatcttctttgtgatgtttgcattcaaatccccgagttgaactttcctttcaaagttcacgtttgaaacactctttttgcaggatctacaagtggatatttggaccactctgtgtccttcgttcgaaacgggtatatcttcacatgacatctagacagaagctttctcagaaaattctttgggatgattgagttgaactcacagagctgagcattccttgcgatgtagcagtttagaaacacactttctgcagaatctgcaagtgcatatttggacctctgtgaggaattcgttggaaacgggataatttcagctgactaaacagaagcattctcagaaccttcttcgtgatgtctgcattcaactcacagtgtggaacctttctttgatagttcaggtttgaaacactctttctgtagaaactgcaaggggataattgcactctttgaggagtaccgtagtaaaggaaataacttcctataaaaagaagacagaagcattctcagaaccctcttcgtgatgtttgcattcaactcacagtgctgaacctttctttgatagttcagctttgaaacactctttttgtagaaactgcaagtggatatttggtcctctctgagcatttcgttggaaacgggataaactgcacagaactaaacagaagcattctcagaaccttcttcgtgatgtttgcattcaactcacagtgttgaacctttctttgatagttcaggtttgaaacggtctttctgtagaaactgcaagtagatatttggacctctctgaggatttcgttggaaacgggataacccgcacagaactaaaacagaagcattcacagaaaactcttggtgacgactgagtttaactcacagagctgaacattcctttggatggagcagtttcgaaacacactatttgtagaatgtgcaagtggatatttaggcctctctgaggatttcgttggaaacgggataaaccgcacagaactaaacagaagcattctcagaaactactttgtgatgattgcattcaagtcacagagttgaacattccctttgacagagcagtttggaaactctctttgtgtagaatctgcaagtggagatatggaccgctttgaggcctatggtagtaaaggaaatagcttcatataaaagctagacagtagcattctcagaaacttctttgtgatgcttgcattcaactcacagagttgaactttcctttcgagagagaagctttgaaacactctttttccagaatctgcaagtggacatttggagggctttgaggcctgtggtggaaaaggaattatcttcccgtaaaagctagatagaagcattgtcagaaacttctttgtgatgattgcattcaactcacagagttgaaggttccttttcaaagagcagtttccaatcactctttctgtggaatctgcaagtggatatttggacctattttgaagatttcgttggaaacgggagaatcttcacaggaaagctaaacagaagcattctcagaaacttctctgtgatgtttgtgttcaactcccagagtttcacattgcttttcatagagtagttctgaaacatgcttttcgtagtgtctacaagtggacatttggagcgctttcaggcctgtggtggaaaacgaattatggtcacataaaaactggagagaagccttctcagaaacttctctgtgatgattgcattcaactcacagagttgaaccctcctatggatagagcagtgttgaaactctctttttgtggaatctgcaagtggatatgtggacctctccgaagatgtctttggaaacgggaatatcttcacataaaaactaaacagaagcattctcagaaacttcttggtgatgtttgcattcaaatcccagagttgaaccttcctttgatagttcaggtttgaaacactctttttgtaggatctgcaagtggatatttggaccactctgtggccttcgttcgaaacgggtatatcttcgcataaaatctagacagaagcattctcagaaaatactttgtgatgattgagtttaactcacagagctgaacattcctttggatggagcaggtttgagacacaccttttgtacaatctacaagtggatatttggacctctctgaggatttcgttggaaacgggataactgcacctaactaaacggaagcattctcagaaactgctttgtgatgattgcattcacctcacagagttgaacattcctattgatagagcagtttggaaacactcttgttgtggaatgtgcaagtggagatttggagcgctttgaggcctatggtagtaaagggaatagcttcatagaaaaactagacagatgcattctcaggaactttttggtgatgtttgtattcaactcccagagttgaactttcctttggaaagagcagctatgaaacactctttttctagaatctgcaagtggacgtttggagggctttgtggtttgtggtgaaaaaggaaatatcttcacctaaatactagatagaagcattctcagaagcttctctgtgatgactgcattcaactcacggagttgaacactccttttgagagcgcagttttgaaactctctttctgtggcatccgcaaggggacatgtagacctctttgaagatttcgttggaaacggaatcatcttcacataaaaactatacagaagcagtctcagaatcttctttgtgatgtttgcattcaaatcccagagttgaactttcctttcaaagttcacgtttgaaacactctttttgcaggatctacaagtggatatttggaccactctgtgtccatcgttcgaaacgggtatatcttcacatgacatctagacagaagctttctcagaaaattctttgggatgattgagtggaactcacagagctgaacattccttgcgatgtagcagtttagaaacacactttctgcagaatctgcaagtgcatatttggacctctctgaggaattcgttggaaacgggataatttcagctgactaaacagaaagcattctcaggaaccttcttcgtgatgtctgcattcaactcacagtgtggaacctttctttgatagttcaggtttgaaacactctttttgtagaaactgcaaggggataattgcacttctttgaggcctaccgtagtaaaggaaataacttcctatagaaagaagacagaagcattctcagaaccctcttcgtgatgtttgcattcaactcacagtgctgaacctttctttgatagttcagctttgaaacactcttcttgtagaaactgcaagtggatatttggtcctctctgaggatttcgttggaaacgggataaaccgcacagaactaaacagaagaattctcagagccctcttcgtgatgtttgcattcaactcacagtgctgaacctttctttgatagtgcagctttgaaacactctttttgtagaaactgcaagtggatatttggtcctctctgaggatttcgctggaaacgggataaaccgcacagaactaaaacagaagcattgtcagaaacttctttgtgatgattgcattcaactcacagagttgaaggttccttttcaaacagcagtttccaatcactctttctgtggaatctgcaagtggatatttgggcctctctgaggatttcgttggaaacgagataaaacgcacagaactaaaacagaagcattctcagaaacttctctgtgatgtttgtgttcaactcccagagtttcacgttgcttttcatagagtagttctgaaacatgcttttcgtagtgtctgcaagtggacatttggagcgctttcaggcctgtggtggaaaacgaattatggtcacataaaaactggagagaagccttctcagaaacttctctgtgatgattgcattcaactcacagagttgaaccctcctatggatagagcagtgttgaaactctctttttgtggaatctgcaagtggatatgtggacctctccgaagatgtctttggaaacgggaatatcttcacataaaaactaaacagaagcattctcagaaacttcttggtgatgtttgcattcaaatcccagagttgaaccttcctttgatagttcaggtttgaaacactctttttgtaggatctgcaagtggctatttggaccactctgtggccttcgttcgaaacgggtatatcttcgcataaaatctagacagaagcattctcagaaaatgctttgtgatgattgagttgaactcacagagctgaacattcctttggatggagcaggcttgagacacactttttgtagaatctacaagtggatatttggacctctctgaggatttcgttggaaacgggataactgcacctaactaaacggaagcattctcagaaactggtttgtgatgattgcattcacctcacagagttgaacattcctattgatagagcagtttggaaacactcttgttgtggaatgtgcaagtggagatttggagcgctttgaggcctatggtagtaaagggaatagcttcatagaaaaactagacagatgcattctcaggaactttttggtgatgtttgtattcaactcccagagttgaactttcctttggaaagagcagctatgaaacactgtttttctagaatctgcaagtggacgtttggagggctttgtggtttgtggtggaaaaggaaatatcttcacctaaatactagatagaagcatcctcagaagcttctctgtgatgactgcattcaactcacggagttgaacactccttttgagagcgcagttttgaaactctctttctgtggcatctgcaaggggacatgtagacctctttgaagatttcattggaaacggaatcatcttcacataaaaactacacagaagcagtctcagaatcttctttgtgatgtttgcattcaaatccccgagttgaactttcctttcaaagttcacgtttgaaacactctttttgcaggatctacaagtggatatttggaccactctgtgtccttcgttcgaaacgggtatatcttcacatgacatctagacagaagctttctcagaaaactctttgggatgattgagttgaactcacagagctgaacattccttgcaatgtagcagtttagaaacacactttctgcagaatctgcaagtgcatatttggacctctctgaggaattcgttggaaacgggataatttcagctgactaaacagaagcattctcagaaccttcttcgtgatgtctgcattcaactcacagtgtggaacctttctttgatagttcaggtttgaaacactctttttgtagaaactgcaaggggataattgcacttctttgaggcctaccgttgtaaaggaaataacttcctataaaaagaagacagaaacattctcagaaccctcttcgtgatgtttgcattcaattcacggtgctgaacctttctttgatagttcagctttgaaacactctttttgtagaaactgcaagtggatatttggtcctctctgaggatttcgttggaaacgggataaaccgcacagaactatacagaagcattctcagaaccttcttcgtgatgtttgcattcaactcacagtgttgaacctttctttgatagttcaggtttgaaacggtctttctgtagaaactgcaagtagatatttggacctctctgaggatttcgctggaaacgggataaaccgcacacaactaaaacagaagcattcacagaaaactcttggtgacgactgagtttaactcacagagctgaacattcctttggatggagcagtttcgaaacacactatttgtagaatgtgcaagtggatatgtgggcctctctgaggatttcgttggaaacgggataaaccgcacagaactaaacagaagcattctcagaaactactttgtgatgattgcattcaagtcacagagttgaacattccctttgacagagcagtttggaaactctctttgtgtagaatctgcaagtggagatatggaccgctttgaggcctatggtagtaaaggaaatagcttcatataaaagctagacagtagcattctcagaaacttctttgtgatgcttgcattcaactcacagagttgaactttcctttcgagagagaagctttgaaacactctttttccagaatctgcaagtggacatttggagggctttgaggcctgtggtggaaaaggaattatcttcccgtaaaagctagatagaagcattgtcagaaacttctttgtgatgattgcattcaactcacagagttgaaggttccttttcaaagagcagtttccaatcactctttgtgtgtaatctgcaagtggatattcggacctattttgaagatttcgttggaaacgggagaatcttcacaggaaagctaaacagaagcattctcagaaacttctctgtgatgtttgtgttcaactcccagagtttcacattgcttttcatagagtagttctgaaacatgcttttcgtagtgtctacaagtggacatttggagcgctttcaggcctgtggtggaaaacgaattatggtcacataaaaactggagagaagccttctcagaaacttctctgtgatgattgcattcaactcacagagttgaaccctcctatggatagagcagtgttgaaactctctttttgtggaatctgcaagtggatatgtggacctctccgaagatgtctttggaaacgggaatatcttcacataaaaactaaacagaagcattctcagaaacttcttggtgatgtttgcattcaaatcccagagttgaaccttcctttgatagttcaggtttgaaacactctttttgtaggatctgcaagtggatatttggaccactctgtggccttcgttcgaaacgggtatatcttcgcataaaatctagacagaagcattctcagaaaatactttgtgatgattgagtttaactcacagagctgaacattcctttggatggagcaggtttgagacacaccttttgtagaatctacaagtggatatttggacctctctgaggatttcgttggaaacgggataactgcacctaactaaacggaagcattctcagaaactgctttgtgatgattgcattcacctcacagagttgaacattcctattgatagagcagtttggaaacactcttgttgtggaatgtgcaagtggagatttggagcgctttgaggcctgtggtagtaaagggaatagcttcatagaaaaactagacagatgcattctcaggaactttttggtgatgtttgtattcaactcccagagttgaactttcctttggaaagagcagctatgaaacactctttttctagaatctgcaagtggacgtttggagggctttgtggtttgtggtggaaaaggaaatatcttcacctaaatactagatagaagcattctcagaagcttctctgtgatgactgcattcaactcacggagttgaacactccttttgagagcgcagttttgaaactctctttctgtggcatctgcaaggggacatgtagacctctttgaagatttcgttggaaacggaatcatcttcacatcaaaactatacagaagcagtctcagaatcttctttgtgatgtttgcattcaaatcccagagttgaactttcctttccaacttcacgtttgaaacactctttttgcaggatctgcaagtggatatttggaccactctgtgtccttcgttcgaaacgggtatatcttcacatgacatctagacagaagctttctcagaaaattctttgggatgattgagtggaactcacagagctgaacattccttgcgatgtagcagtttagaaacacactttctgcagaatctgcaagtgcatatttggacctctctgaggaattcgttggaaacgggataatttcagctgactaaacagaagcattctcagaaccttcttcgtgatgtctgcattcaactcacagtgtggaacctttctttgatagttcaggtttgaaacactctttttgtagaaactgcaaggggataattgcacttctttgaggcctaccgtagtaaaggaaataacttcctatagaaagaagacagaagcattctcagaaccctcttcgtgatgtttgcattcaactcacagtgctgaatctttctttgatagttcagctttgaaacactcttcttgtagaaactgcaagtggatatttggtcctctctgaggatttcgttggaaacgggataaaccgcacagaactaaacagaagcattctcagaaccttcttcgtgatgtttgcattcaactcacagtgttgaacctttctttgatagttcaggtttgaaacggtctttctgtagaaactgcaagtagatctttggacctctctgaggatttcgttggaaacgggataacccgcacagaactaaaacagaagcattcacagaaaactcttggtgacgactgagtttaactcacagagctgaacattcctttggatggagcagtttcgaaacacactatttgtagaatgtgcaagtggatatttgggcctctctgaggatttcgttggaaacgggataaaccgcacagaactaaacagaagcattctcaaaaactactttgtgatgattgcattcaagtcacagagttgaacattccctttgacagagcagtttggaaactctctttgtgtagaatctgcaagtggagatatggaccgctttgaggcctatggtagtaaaggaaatagcttcatataaaagctagacagtagcattctcagaaacttctttgtgatgcttgcattcaactcacagagttgaactttcctttcgagagagaagctttgaaacactctttttccagaatctgcaagtggacatttggagggctttgaggcctgtggtggaaaaggaattaacttcccataaaagctagatagaagcattgtcagaaacttctttctgatgattgcattcaactcatagagatgaaggttcctttacaaacagcagtttccaaacactctttctctggaatctgcaagtggatatttggacctctttgaagatttcgttggaaacgggagaatcttcacagaaaagctaaacagaagcattctcagaaacttctctgtgatgtttgtgttcaactcccagagtttcacattgcttttcatagagtagttctgaaacatgcttttcgtagtgtctgcaagtggacatttggagcgctttcaggcctgtggtggaaaacgaattatggtcccataaaaactggagagaagccttctcagaaacttctctgtgatgattgcattcaactcacagatttgaaccctcctatggatagagcattgttgaaactctctttttgtggaatctgcaagtggatatgtggacctctccgaagatgtctttggaaacgggaatatcttcacataaaaactaaacagaagcattctcagaaacttattggtgatgtttgcattcaaatcccagagttgaaccttcctgtgatagttcaggtttgaaacactcattttgtaggatctgcaagtggatatttggaccactctgtggccttcgttcgaaacgggtacatcttcacataaaatctagacagaagcattctcagaaaatactttgtgatgattgagtttaactcacagagctgaacattcctttggatggagcaggtttgagacacactttttgtagaatctacaagtggatatttggacctctctgaggatttcgttggaaacgcgataactgcacctaactaaacggaagcattctcagaaactgctttgtgatgattgcattcacctcacagagttgaacattcctattgatagagcagtttggaaacactcttgttgtggaatgtgcaagtggagatttggagcgctttgaggcctatggtagtaaagggaatagcttcatagaaaaactagacagatgcattctcaggaactttttggtgatgtttgtattcaactcccagagttgaactttcctttggaaagagcagctatgaaacactctttttctagaatctgcaagtggacgtttggagggctttgtggtttgtggtggaaaaggaaatatcttcacctaaatactagatagaagcattctcagaagcttctctgtgatgactgcattcaactcacggagttgaacactccttttgagagcgcagttttgaaactctctttctgtggcatctgcaaggggacatgtagacctctttgaagatttcgttggaaacggaatcatcttcacataaaaactatacagaagcagtctcagaatcttctttgtgatgtttgcattcaaatcccagagttgaactttcctttcaaagttcacgtttgaaacactctttttgcaggatctacaagtggatatttggaccactctgtgtccttcgttcgaaacgggtatatcttcacacgacatctagacagaagctttctcagaaaattctttgggatgattgagtggaactcacagagctgaacattccttgcgatgtagcagtttagaaacacactttctgcagaatctgcaagtgcatatttggacctctctgaggaattcgttggaaacgggataatttcagctgactaaacagaagcattctcagaaccttcttcgtgatgtctgcattcaactcacagtgtggaacctttctttgatagttcaggtttgaaacactctttttgtagaaactgcaaggggataattgcacttctttgaggcctaccgtagtaaaggaaataacttcctatagaaagaagacagaagcattctcagaaccctcttcgtgatgtttgcattcaactcacagtgctgaacctttctttgatagttcagctttgaaacactcttcttgtagaaactgcaagtggatatttggtcctctctgaggatttcgttggaaacgggataaaccgcacagaactaaacagaagaattctcagagccctcttcgtgatgtttgcattcaactcacagtgctgaacctttctttgatagtgcagctttgaaacactctttttgtagaaactgcaagtggatgtttggtcctctctgaggatttcgttggaaacgggataaaccgcacagaactaaaacagaagcattgtcagaaacttctttgtgatgattgcattcaactcacagagttgaaggttccttttcaaacagcagtttccaatcactctttctgtggaatctgcaagtggatatttgggcctctctgaggatttcgttggaaacgggataaaacgcacagaactaaaacagaagcattctcagaaacttctctgtgatgtttgtgttcaactcccagagtttcacgttgcttttcatagagtagttctgaaacatgcttttcgtagtgtctgcaagtggacatttggagcgctttcaggcctgtggtggaaaacgaattatggtcacataaaaactggagagaagccttctcagaaacttctctgtgatgattgcattcaactcacagagttgaaccctcctatggatagagcagtgttgaaactctctttttgtggaatctgcaagtggatatgtggacctctccgaagatgtctttggaaacgggaatatcttcacataaaaactaaacagaagcattctcagaaacttcttggtgatgtttgcattcaaatcccagagttgaaccttcctttgatagttcaggtttgaaacactctttctgtaggatctgcaagtggctatttggaccactctgtggccttcgttcgaaacgggtatatcttcgcataaaatctagacagaagcattctcagaaaatactttgtgatgattgagtttaaatcacagagctgaccattcctttggatggagcaggtttgagacacactttttgtagaatctacaagtggatatttggacctctctgaggatttcgttggaaacgggataactgcacctaactaaacggaagcattctcagaaactgctttgtgatgattgcattcacctcacagagttgaacattcctattgatagagcagtttggaaacactcttgttgtggaatgtgcaagtggagatttggagcgctttgaggcctatggtagtaaagggaatagcttcatagaaaaactagacagatgcattctcaggaactttttggtgatgtttgtattcaactcccagagttgaactttcctttggaaagagcagctatgaaacactctttttctagaatctgcaagtggacgtttggagggctttgtggtttgtggtggaaaaggaaatatcttcacctaaatactagatagaagcattctcagaagcttctctgtgatgactgcattcaactcacggagttgaacactccttttgagagcgcagttttgaaactctctttctgtggcatctgcaaggggacatgtagacctctttgaagatttcgttggaaacggaatcatcttcacataaaaactatacagaagcagtctcagaatcttctttgtgatgtttgcattcaaatcccagagttgaactttcctttcaaagttcacgtttgaaacactctttttgcaggatctacaagtggatatttggaccactctgtgtccttcgttcgaaacgggtatatcttcacacgacatctagacagaagctttctcagaaaattctttgggatgattgagtggaactcacagagctgaacattccttgcgatgtagcagtttagaaacacactttctgcagaatctgcaagtgcatatttggacctctctgaggaattcgttggaaacgggataatttcagctgactaaacagaagcattctcagaaccttcttcgtgatgtctgcattcaactcacagtgtggaacctttctttgatagttcaggtttgaaacactctttttgtagaaactgcaaggggataattgcacttctttgaggcctaccgtagtaaaggaaataacttcctatagaaagaagacagaagcattctcagaaccctcttcgtgatgtttgcattcaactcacagtgctgaacctttctttgatagttcagctttgaaacactcttcttgtagaaactgcaagtggatatttggtcctctctgaggatttcgttggaaacgggataaaccgcacagaactaaacagaagaattctcagagccctcttcgtgatgtttgcattcaactcacagtgctgaacctttctttgatagtgcagctttgaaacactctttttgtagaaactgcaagtggatgtttggtcctctctgaggatttcgttggaaacgggataaaccgcacagaactaaaacagaagcattgtcagaaacttctttgtgatgattgcattcaactcacagagttgaaggttccttttcaaacagcagtttccaatcactctttctgtggaatctgcaagtggatatttgggcctctctgaggatttcgttggaaacgggataaaacgcacagaactaaaacagaagcattctcagaaacttctctgtgatgtttgtgttcaactcccagagtttcacgttgcttttcatagagtagttctgaaacatgcttttcgtagtgtctgcaagtggacatttggagcgctttcaggcctgtggtggaaaacgaattatggtcacataaaaactggagagaagccttctcagaaacttctctgtgatgattgcattcaactcacagagttgaaccctcctatggatagagcagtgttgaaactctctttttgtggaatctgcaagtggatatgtggacctctccgaagatgtctttggaaacgggaatatcttcacataaaaactaaacagaagcattctcagaaacttcttggtgatgtttgcattcaaatcccagagttgaaccttcctttgatagttcaggtttgaaacactctttttgtaggatctgcaagtggctatttggaccactctgtggccttcgttcgaaacgggtatatcttcgcataaaatctagacagaagcattctcagaaaatactttgtgatgattgagtttaaatcacagagctgaccattcctttggatggagcaggtttgagacacactttttgtagaatctacaagtggatatttggacctctctgaggatttcgttggaaacgggataactgcacctaactaaacggaagcattctcagaaactgctttgtgatgattgcattcacctcacagagttgaacattcctattgatagagcagtttggaaacactcttgttgtggaatgtgcaagtggagatttggagcgctttgaggcctatggtagtaaagggaatagcttcatagaaaaactagagagatgcattctcaggtaactttttggtgatgtttgtattcaactcccagtagttgaactttcctttggaaagagcagctatgaaacactgtttttctagaatctgcaagtggacgtttggagggctttgtggtttgtggtggaaaaggaaatatcttcacctaaatactagatagaagcattctcagaagcttctctgtgatgactgcattcaactcacggagctgaacactccttttgagagcgcagttttgaaactctctttctgtggcatctgcaaggggacatgtagacctctctgaagatttcgttggaaacggaatcatcttcacataaaaactatacagaagcagtctcagaatcttctttgtgatgtttgcattcaaatcccagagttgaactttcctttcaaagttcacgtttgaaacactctttttgcaggatctacaagtggatatttggaccactctgtgtccttcgttcgaaacgggtatatcttcacacgacatctagacagaagctttctcagaaaattctttgggatgattgagtggaactcacagagctgaacattcccttgcgatgtagcagtttagaaacacactttctgcagaatctgcaagtgcatatttggacctctctgaggaattcgttggaaacgggataatttcagctgactaaacagaagcattctcagaaccttcttcgtgatgtctgcattcaactcacagtgtggaacctttctttgatagttcaggtttgaaacactctttttgtagaaactgcaaggggataattgcacttctttgaggcctaccgtagtaaaggaaataacttcctatagaaagaagacagaagcattctcagaaccctcttcgtgatgtttgcattcaactcacagtgctgaacctttctttgatagttcagctttgaaacactcttcttgtagaaactgcaagtggatatttggtcctctctgaggatttcgttggaaacgggataaaccgcacagaactaaacagaagaattctcagagccctcttcgtgatgtttgcattcaactcacagtgctgaacctttctttgatagtgcagctttgaaacactctttttgtagaaactgcaagtggatgtttggtcctctctgaggatttcgttggaaacgggataaaccgcacagaactaaaacagaagcattgtcagaaacttctttgtgatgattgcattcaactcacagagttgaaggttccttttcaaacagcagtttccaatcactctttctgtggaatctgcaagtggatatttgggcctctctgaggatttcgttggaaacgggataaaacgcacagaactaaaacagaagcattctcagaaacttctctgtgatgtttgtgttcaactcccagagtttcacgttgcttttcatagagtagttctgaaacatgcttttcgtagtgtctgcaagtggacatttggagcgctttcaggcctgtggtggaaaacgaattatggtcacataaaaactggagagaagcattctcagaaaatactttgtgatgattgagtttaaatcacagagctgaccattcctttggatggagcaggtttgagacacactttttgtagaatctacaagtggatatttggacctctctgaggatttcgttggaaacgggataactgcacctaactaaacggaagcattctcagaaactgctttgtgatgattgcattcacctcacagagttgaacattcctattgatagagcagtttggaaacactcttgttgtggaatgtgcaagtggagatttggagcgctttgaggcctgtggtagtaaagggaatagcttcatagaaaaactagacagatgcattctcaggaactttttggtgatgtttgtattcaactcccagagttgaactttcctttggaaagagcagctatgaaacactctttttctagaatctgcaagtggacgtttggagggctttgtggtttgtggtggaaaaggaaatatcttcacctaaatactagatagaagcattctcagaagcttctctgtgatgactgcattcaactcacggagttgaacactccttttgagagcgcagttttgaaactctctttctgtggcatctgcaaggggacatgtagacctctttgaagatttcgttggaaacggaatcatcttcacataaaaactatacagaagcagtctcagaatcttctttgtgatgtttgcattcaaatccccgagttgaactttcctttcaaagttcacgtttgaaacactctttttgcaggatctacaagtggatatttggaccactctgtgtccttcgttcgaaacgggtatatcttcacatgacatctagacagaagctttctcagaaaattctttgggatgattgagttgaactcacagagctgagcattccttgcgatgtagcagtttagaaacacactttctgcagaatctgcaagtgcatatttggacctctgtgaggaattcgttggaaacgggataatttcagctgactaaacagaagcattctcagaaccttcttcgtgatgtctgcattcaactcacagtgtggaacctttctttgatagttcaggtttgaaacactctttttgtagaaactgcaaggggataattgcactctttgaggagtaccgtagtaaaggaaataacttcctataaaaagaagacagaagcattctcagaaccctcttcgtgatgtttgcattcaactcacagtgctgaacctttctttgatagttcagctttgaaacactctttttgtagaaactgcaagtggatatttggtcctctctgaggatttcgttggaaacgggataaactgcacagaactaaacagaagcattctcagaacttcttcgtgatgtttgcattcaactcacagtgttgaacctttctttgatagttcaggtttgaaacggtctttctgtagaaactgcaagtagatatttggacctctctgaggatttcgttggaaacgggataacccgcacagaactaaaacagacagcattctcagaaaactctttgtgacgactgagtttaactcacagggctgaacattcctttggatggagcagtttggaaacacactatctgtaggatctgcaagcggatacttgggcctctctgaggatttcgttggaaacgggataaaccgcacagaactaaacagagcattctcagaaactactttgtgatgattgcattcaagtcacagagttgaacattccctttgacagagcagtttggaaactcactttgtgtagaatctgcaagtggagatatggaccgctttgaggcctatggtagtaaaggaaatagcttcatataaaagctagacagtagcattctcagaaacttctttgtgatgcttgcattcaactcacagtagttgaactttcctttcgagagagaagctttgaaacactctttttccagaatgtgcaagtggacatttggggagctttgaggcctgtggtggaaaaggaattatcttcccgtaaaagctagatagaagcattgtcagaaacttctttgtgatgattgcattcaactcacagagttgaaggttccttttcaaacagcagtttccaatcactctttctgtggaatctgcaagtggatatttgggcctctctgaggatttcgttggaaacgggataaaacgcacagaactaaaacagaagcattctcagaaacttctctgtgatgtttgtgttcaactcccagagtttcacgttgcttttcatagagtagttctgaaacatgcttttcgtagtgtctgcaagtggacatttggagcgctttcaggcctgtggtggaaaacgaattatggtcacataaaaactggagagaagccttctcagaaacttctctgtgatgattgcattcaactcacagagttgaaccctcctatggatagagcagtgttgaaactctctttttgtggaatctgcaagtggatatgtggacctctccgaagatgtctttggaaacgggaatatcttcacataaaaactaaacagaagcattctcagaaacttcttggtgatgtttgcattcaaatcccagagttgaaccttcctttgatagttcaggtttgaaacactctttctgtaggatctgcaagtggctatttggaccactctgtggcccttcgttcgaaacgggtatatcttcgcataaaatctagacagaagcattctcagaaaatactttgtgatgattgagtttaaatcacagagctgaccattcctttggatggagcaggtttgagacacactttttgtagaatctacaagtggatatttggacctctctgaggatttcgttggaaacgggataactgcacctaactaaacggaagcattctcagaaactgctttgtgatgattgcattcacctcaccagagttgaacattcctattgatagagcagtttggaaacactcttgttgtggaatgtgcaagtggagatttggagcgctttgaggcctatggtagtaaagggaatagcttcatagaaaaactagacagatgcattctcaggaactttttggtgatgtttgtattcaactcccagagttgaactttcctttggaaagagcagctatgaaacactctttttctagaatctgcaagtggacgtttggagggctttgtggtttgtggtggaaaaggaaatatcttcacctaaatactagatagaagcattctcagaagcttctctgtgatgactgcattcaactcacggagttgaacactccttttgagagcgcagttttgaaactctctttctgtggcatctgcaaggggacatgtagacctctttgaagatttcgttggaaacggaatcatcttcacataaaaactatacagaagcagtctcagaatcttctttgtgatgtttgcattcaaatcccagagttgaactttcctttcaaagttcacgtttgaaacactctttttgcaggatctacaagtggatatttggaccactctgtgtccttcgttcgaaacgggtatatcttcacacgacatctagacagaagctttctcagaaaattctttgggatgattgagtggaactcacagagctgaacattccttgcgatgtagcagtttagaaacacactttctgcagaatctgcaagtgcatatttggacctctctgaggaattcgttggaaacgggataatttcagctgactaaacagaagcattctcagaaccttcttcgtgatgtctgcattcaactcacagtgtggaacctttctttgatagttcaggtttgaaacactctttttgtagaaactgcaaggggataattgcacttctttgaggcctaccgtagtaaaggaaataacttcctatagaaagaagacagaagcattctcagaaccctcttcgtgatgtttgcattcaactcacagtgctgaacctttctttgatagttcagctttgaaacactcttcttgtagaaactgcaagtggatatttggtcctctctgaggatttcgttggaaacgggataaaccgcacagaactaaacagaagcattctcagagccctcttcgtgatgtttgcattcaactcacagtgctgaacctttctttgatagtgcagctttgaaacactctttttgtagaaactgcaagtggatatttggtcctctctgaggatttcgttggaaacgggataaaccgcacagaactaaaacagaagcattcacagaaaactcttggtgacgactgagtttaactcacagagctgaacattcctttggatggagcagtttcgaaacacactatttgtagaatctgcaagtggatatttgggcctctctgaggatttcattggaaacgggataaaacgcacagaactaaaacagaagcattctcagaaactactttgtgatgattgcattcaagtcacagagttgaacattccctttgacagagcagtttggaaactctctttgtgtagaatctgcaagtggagatatggaccgctttgaggcctatggtagtaaaggaaatagcttcatataaaagctagacagtagcattctcagaaacttctttgtgatgcttgcattcaactcacagagttgaaatttcctttcgagagagaagctttgaaacactctttttccagaatctgcaagtggacatttggagggctttgaggcctgtggtggaaaaggaattatcttcccgtaaaagctagatagaagcattgtcagaaacttctttgtgatgattgcattcaactcacagagttgaaggttccttttcaaagagcagtttccaatcactctttctgtggaatctgcaagtggatatttggacctattttgaagatttcgttggaaacgggagaatcttcacaggaaagctaaacagaagcattctcagaaacttctctgtgatgtttgtgttcaactcccagagtttcacattgcttttcatagagtagttctgaaacatgcttttcgtagtgtctacaagtggacatttggagcgctttcaggcctgtggtggaaaacgaattatggtcacataaaaactggagagaagccttctcagaaacttctctgtgatgattgcattcaactcacagagttgaaccctccctatggatagagcagtgttgaaactctctttttgtggaatctgcaagtggatatgtggacctctccgaagatgtctttggaaacgggaatatcttcacataaaaactaaacagaagcattctcagaaacttcttggtgatgtttgcattcaaatcccagagttgaaccttcctttgatagttcaggtttgaaacactctttttgtaggatctgcaagtggatatttggaccactctgtggccttcgttcgaaacgggtatatcttcgcataaaatctagacagaagcattctcagaaaatactttgtgatgattgagttgaactcacagagctgaacattcctttggatggagcaggtttgagacacactttttgtagaatctacaagtggatatttggacctctctgaggatttcgttggaaacgggataactgcacctaactaaacggaagcattctcagaaactgctttgtgatgattgcattcacctcacagagttgaacattcctattgatagagcagtttggaaacactcttcttgtggaatgtgcaagtggagatttggagcgctttgaggcctatggtagtaaagggaatagcttcatagaaaaactagacagatgcattctcaggaactttttggtgatgtttgtattcaactcccagagttgaactttcctttggaaagagcagctatgaaacactctttttctagaatctgcaagtggacgtttggagggctttgtggtttgtggtggaaaaggaaatatcttcacctaaatactagatagaagcattctcagaagcttctctgtgatgactgcattcaactcacggagttgaacactccttttgagagcgcacttttgaaactctctttctgtggcatctgcaaggggacatgtagacctctttgaagatttcgttggaaacggaatcatcttcacataaaaactatacagaagcagtctcagaatcttctttgtgatgtttgcattcaaatcccagagttgaactttcctttcaaagttcacgtttgaaacactctttttgcaggatctacaagtggatatttggaccactctgtgtccttcgttcgaaacgggtatatcttcacatgacatctagacagaagctttctcagaaaattcttggggatgattgagtggaactcacagagctgaacattccttgcgatgtagcagtttagaaacacactttctgcagaatctgcaagtgcatatttggacctctctgaggaattcgttggaaacgggataatttcagctgactaaacagaagcattctcagaaccttcttcgtgatgtctgcattcaactcacagtgtggaacctttctttgatagttcaggtttgaaacactctttttgtagaaactgcaaggggataattgcacttctttgaggcctaccgtagtaaaggaaataacttcctatagaaagaagacagaagcattctcagaaccctcttcgtgatgtttgcattcaactcacagtgctgaatctttctttgatagttcagctttgaaacactcttcttgtagaaactgcaagtggatatttggtcctctctgaggatttcgttggaaacgggataaaccgcacagaactaaacagaagcattctcagaaccttcttcgtgatgtttgcattcaactcacagtgttgaacctttctttgatagttcaggtttgaaacggtctttctgtagaaactgcaagtagatatttggacctctctgaggatttcgttggaaacgggataacccgcacagaactaaaacagaagcattcacagaaaactcttggtgacgactgagtttaactcacagagctgaacattcctttggatggagcagtttcaaaacacactatttgtagaatgtgcaagtggatatgtgggcctctctgaggatttcgttggaaacgggataaaccgcacagaactaaacagaagcattctcagaaactactttgtgatgattgcattcaagtcacagagttgaacattccctttgacagagcagtttggaaactctctttgtgtagaatctgcaagtggagatatggaccgctttgaggcctatggtagtaaaggaaatagcttcatataaaaccagaccgtaagcattctcagaaacttctttgtgatgcttgcattcaactcacagagttgaactttcctttcgagagagaagctttgaaacactctttttccagaatctgcaagtggacatttggagggctttgaggcctgtggtggaaaaggaattatcttcccgtaaaagctagatagaagcattgtcagaaacttctttgtgatgattgcattcaagtcacagagttgaaggttccttttcaaagagcagtttccaatcacactttctgtggaatctgcaagtggatatttggacctctttgaagatttcgttggaaacgggagaatcttcacagaaaagctaaacagaagcattctcagaaacctctctgtgatgtttgtgttcaactcccagagtttcacattgcttctcgtagagtagttctgaaacatgcttttcgtagtgtctgcaagtggacatttggagcgctttcaggcctgtggtggaaaacgaattatggtcacataaaaactggagagaagccttctcagaaacttctctgtgatgattgcattcaactcacagagttgaaccctcctatggatagagcagtgttgaaactctctttttgtggaatctgcaagcggatatgtggacctctccgaagatgtctttggaaacgggaatatcttcacataaaaactaaacagaagcattctcagaaacttcttggtgatgtttgcattcaaatcccagagttgaaccttcctttgagagttcaggtttgaaacactctttttgtaggatctgcaagtggatatttggaccactctgtggccttcgttcgaaacgggtacatcttcgcataaaatctagacagaagcattctcagaaaatactttgtgatgattgagttgaactcacagagctgaacattcctttggatggagcaggtttgagacacactttttgtagaatctacaagtggatatttggacctctctgaggatttcgttggaaacgggataactgcacctaactaaacggaagcattctcagaaactgctttgtgatgattgcattcacctcacagagttgaacattcctattgatagagcaggttggaaacactcttgttgtggaatgtgcaagtggagatttggagcgctttgaggcctatggtagtaaagggaatagcttcatagaaaaactagacagatgcattctcaggaactttttggtgatgtttgtattcaactcccagagttgaactttcctttggaaagagcagctatgaaacactctttttctagaatctgcaagtggacgtttggagggctttgtggtttgtggtggaaaaggaaatatcttcacctaaatactagagagaagcattctcagaagcttctctgtgatgactgcattcaactcacggagttgaacactcctcttgagagcgcagttttgaaactctctttctgtggcatccgcaaggggacatgtagacctctttgaagatttcgttggaaacggaatcatcttcacataaaatctatacagaagcagtctcagaatcttctttgtgatgtttgcattcaaatcccagagttgaactttcctttcaaagttcacgtttgaaacactctttttgcaggatctacaagtggatatttggaccactctgtgtccttcgttcgaaacgggtatatcttcacatgacatctaggcagaagctttctcagaaaattctttgggatgattgagtggaactcacagagctgaacattccttgcgatgtagcagtttagaaacacactttctgcagaatctgcaagtgcatatttggacctctctgaggaattcgttggaaacgggataatttcagctgactaaacagaagcattctcagaaccttcttcgtgatgtctgcattcaactcacagtgtggaacctttctttgatagttcaggtttgaaacactctttttgtagaaactgcaaggggataattgcacttctttgaggcctaccgtagtaaaggaaataacttcctatagaaagaagacagaagcattctcagaaccctcttcgtgatgtttgcattcaactcacagtgctgaacctttctttgatagttcagctttgaaacactcttcttgtagaaactgcaagtggatatttggtcctctctgaggatttcgttggaaacgggataaaccgcacagaactaaacagaagaattctcagagccctcttcgtgatgtttgcattcaactcacagtgctgaacctttctttgatagtgcagctttgaaacactctttttgtagaaactgcaagtggatgtttggtcctctctgaggatttcgttggaaacgggataaaccgcacagaactaaaacagaagcattgtcagaaacttctttgtgatgattgcattcaactcacagagttgaaggttccttttcaaacagcagtttccaatcactctttctgtggaatctgcaagtggatatttgggcctctctgaggatttcgttggaaacgggataaaacgcacagaactaaaacagaagcattctcagaaacttctctgtgatgtttgtgttcaactcccagagtttcacgttgcttttcatagagtagttctgaaacatgcttttcgtagtgtctgcaagtggacatttggagcgctttcaggcctgtggtggaaaacgaattatggtcacataaaaactggagagaagccttctcagaaacttctctgtgatgattgcattcaactcacagagttgaaccctcctatggatagagcagtgttgaaactctctttttgtggaatctgcaagtggatatgtggacctctccgaagatgtctttggaaacgggaatatcttcacataaaaactaaacagaagcattctcagaaacttcttggtgatgtttgcattcaaatcccagagttgaaccttcctttgatagttcaggtttgaaacactctttctgtaggatctgcaagtggctatttggaccactctgtggccttcgttcgaaacgggtatatcttcgcataaaatctagacagaagcattctcagaaaatactttgtgatgattgagtttaaatcacagagctgaccattcctttggatggagcaggtttgagacacactttttgtagaatctacaagtggatatttggacctctctgaggatttcgttggaaacgggataactgcacctaactaaacggaagcattctcagaaactgctttgtgatgattgcattcacctcacagagttgaacattcctattgatagagcagtttggaaacactcttgttgtggaatgtgcaagtggagatttggagcgctttgaggcctgtggtagtaaagggaatagcttcatagaaaaactagacagatgcattctcaggaactttttggtgatgtttgtattcaactcccagagttgaactttcctttggaaagagcagctatgaaacactctttttctagaatctgcaagtggacgtttggagggctttgtggtttgtggtggaaaaggaaatatcttcacctaaatactagatagaagcattctcagaagcttctctgtgatgactgcattcaactcacggagttgaacactccttttgagagcgcagttttgaaactctctttctgtggcatctgcaaggggacatgtagacctctttgaagatttcgttggaaacggaatcatcttcacataaaaactatacagaagcagtctcagaatcttctttgtgatgttagcattcaaatcccagagttgaactttcctttcaaagttcacgtttgaaacactctttttgcaggatctacaagtggatatttggaccactctgtgtccttcgtttgaaacgggtatatcttcacacgacatctagacagaagctttctcagaaaattctttgggatgattgagtggaactcacagagctgaacattccttgcgatgtagcagtttagaaacacactttctgcagaatctgcaagtgcatatttggacctctctgaggaattcgttggaaacgggataatttcagctgactaaacagaagcattctcagaaccttcttcgtgatgtctgcattcaactcacagtgtggaacctttctttgatagttcaggtttgaaacactctttttgtagaaactgcaaggggataattgcacttctttgaggcctaccgtagtaaaggaaataacttcctatagaaagaagacagaagcattctcagaaccctcttcgtgatgtttgcattcaactcacagtgctgaacctttctttgatagttcagctttgaaacactcttcttgtagaaactgcaagtggatatttggacctctctgaggatttcgttggaaacgggataaaccgcacagaactaaacagaagcattctcagaaccttcttcgtgatgtttgcattcaactcacagtgttgaacctttctttgatagttcaggtttgaaacggtctttctgtagaaactgcaagtagatatttggacctctctgaggatttcgttggaaacgggataacccgcacagaactaaaacagaagcattcacagaaaactcttggtgacgactgagtttaactcacagagctgaacattcctttggatggagcagtttcgaaacacactatttgtagaatgtgcaagtggatatttgggcctcactgaggatttcgttggaaacgggataaaccgcacagaactaaacagaagcattctcagtaaactactttgtgatgattgcattcaagtcacagagttgaacattccctttgacagagcagtttggaaactctttttgtgtagaatctgcaagtggagatatggaccgctttgaggcctatggtagtaaaggaaatagcttcatataaaagctagacggtagcattctcagaaacttctttgtgatgcttgcattcaactcacagagttgaactttcctttcgagagagaagctttgaaacactctttttccagaatgtgcaagtggacatttggggagctttgaggcctgtggtggaaaaggaattatcttcccgtaaaagctagatagaagcattgtcagaaacttctttgtgatgattgcattcaactcacagagttgaaggttccttttcaaacagcagtttccaatcactctttctgtggaatctgcaagtggatattttgacctctttgaagatttcattggaaacgggagaatcttcacagaaaagctaaacagaagcattctcagaaacttctctgtgatgtttgtgttcaactcccagagtttcacgttgcttttcatagagtagttctgaaacatgcttttcgtagtgtctgcaagtggacatttggagcgctttcaggcctgtggtggaaaacgaattatggtcacataaaaactggagagaagccttctcagaaacttctctgtgatgattgcattcaactcacagagttgaaccctcctatggatagagcagtgttgaaactctctttttgtggaatctgcaagtggatatgtggacctctccgaagatgtctttggaaacgggaatatcttcacataaaaactaaacagaagcattctcagaaacttcttggtgatgtttgcattcaaatcccagagttgaaccttcctttgatagttcaggtttgaaacactctttctgtaggatctgcaagtggctatttggaccactctgtggccttcgttcgaaacgggtatatcttcgcataaaatctagacagaagcattctcagaaaatactttgtgatgattgagtttaaatcacagagctgaccattcctttggatggagcaggtttgagacacactttttgtagaatctacaagtggatatttggacctctctgaggatttcgttggaaacgggataactgcacctaactaaacggaggcattctcagaaactgctttgtgatgattgcattcacctcacagagttgaacattcctattgatagagcagtttggaaacactcttgttgtggaatgtgcaagtggagatttggagcgctttgaggcctatggtagtaaagggaatagcttcatagaaaaactagacagatgcattctcaggaactttttggtgatgtttgtattcaactcccagagttgaactttcctttggaaagagcagctatgaaacactctttttctagaatctgcaagtggacgtttggagggctttgtggtttgtggtggaaaaggaaatatcttcacctaaatactagatagaagcattctcagaagcttctctgtgatgactgcattcaactcacggagttgaacactccttttgagagcgcagttttgaaactctctttctgtggcatctgcaaggggacatgtagacctctttgaagatttcgttggaaacggaatcatcttcacataaaaactatacagaagcagtctcagaatcttctttgtgatgtttgcattcaaatcccagagttgaactttcctttcaaagttcacgtttgaaacactctttttgcaggatctacaagtggatatttggaccactctgtgtccttcgttcgaaacgggtatatcttcacacgacatctagacagaagctttctcagaaaattctttgggatgattgagtggaactcacagagctgaacattccttgcgatgtagcagtttagaaacacactttctgcagaatctgcaagtgcatatttggacctctctgaggaattcgttggaaacgggataatttcagctgactaaacagaagcattctcagaaccttcttcgtgatgtctgcattcaactcacagtgtggaacctttctttgatagttcaggtttgaaacactctttttgtagaaactgcaaggggataattgcacttctttgaggcctaccgtagtaaaggaaataacttcctatagaaagaagacagaagcattctcagaaccctcttcgtgatgtttgcattcaactcacagtgctgaacctttctttgatagttcagctttgaaacactcttcttgtagaaactgcaagtggatatttggtcctctctgaggatttcgttggaaacgggataaaccgcacagaactaaacagaagaattctcagagccctcttcgtgatgtttgcattcaactcacagtgctgaacctttctttgatagtgcagctttgaaacactctttttgtagaaacttcaagtggatgtttggtcctctctgaggatttcgttggaaacgggataaaccgcacagaactaaaacagaagcgttgtcagaaacttctttgtgatgattgcattcaactcacagagttgaaggttccttttcaaacagcagtttccaatcactctttctgtggaatctgcaagtggatatttgggcctctctgaggatttcgttggaaacgggataaaacgcacagaactaaaacagaagcattctcagaaacttctctgtgatgtttgtgttcaactcccagagtttcacgttgcttttcatagagtagttctgaaacatgcttttcgtagtgtctgcaagtggacatttggagcgctttcaggcctgtggtggaaaacgaattatggtcacataaaaactggagagaagccttctcagaaacttctctgtgatgattgcattcaactcacagagttgaaccctcctatggatagagcagtgttgaaactctctttttgtggaatctgcaagtggatatgtggacctctccgaagatgtctttggaaacgggaatatcttcacataaaaactaaacagaagcattctcagaaacttcttggtgatgtttgcattcaaatcccagagttgaaccttcctttgatagttcaggtttgaaacactctttctgtaggatctgcaagtggctatttggaccactctgtggccttcgttcgaaacgggtatatcttcgcataaaatctagacagaagcattctcagaaaatactttgtgatgattgagtttaaatcacagagctgaccattcctttggatggagcaggtttgagacacactttttgtagaatctacaagtggatatttggacctctctgaggatttcgttggaaacgggataactgcacctaactaaacggaagcattctcagaaactgctttgtgatgattgcattcacctcacagagttgaacattcctattgatagagcagtttggaaacactcttgttgtggaatgtgcaagtggagatttggagcgctttgaggcctatggtagtaaagggaatagcttcatagaaaaactagacagatgcattctcaggaactttttggtgatgtttgtattcaactcccagagttgaactttcctttggaaagagcagctatgaaacactctttttctagaatctgcaagtgaacgtttggagggctttgtggtttgtggtggaaaaggaaatatcttcacctaaatactagatagaagcattctcagaagcttctctgtgatgactgcattcaactcacggagttgaacactccttttgagagcgcagttttgaaactctctttctgtggcatctgcaaggggacatgtagacctctttgaagatttcgttggaaacggaatcatcttcacataaaaactatacagaagcagtctcagaatcttctttgtgatgtttgcattcaaatcccagagttgaactttcctttcaaagttcacgtttgaaacactctttttgcaggatctacaagtggatatttggaccactctgtgtccttcgttcgaaacgggtatatcttcacacgacatctagacagaagctttctcagaaaattctttgggatgattgagtggaactcacagagctgaacattccttgcgatgtagcagtttagaaacacactttctgcagaatctgcaagtgcatatttggacctctctgaggaattcgttggaaacgggataatttcagctgactaaacagaagcattctcagaaccttcttcgtgatgtctgcattcaactcacagtgtggaacctttctttgatagttcaggtttgaaacactctttttgtagaaactgcaaggggataattgcacttctttgaggcctaccgtagtaaaggaaataacttcctatagaaagaagacagagcattctcagaaccctcttcgtgatgtttgcattcaactcacagtgctgaacctttctttgatagttcagctttgaaacactcttcttgtagaaactgcaagtggatatttggtcctctctgaggatttcgttggaaacgggataaaccgcacagaactaaacagaagcattctcagaaccttcttcgtgatgtttgcattcaactcacagtgttgaacctttctttgatagttcaggtttgaaacggtctttctgtagaaactgcaagtagatatttggacctctctgaggatttcgttggaaacgggataaaccgcacagaactaaacagaagcattcacagaaaactcttggtgacgactgagtttaactcacagagctgaacattcctttggatggagcagtttcgaaacacactatttgtagaatgtgcaagtggatatttgggcctctctgaggatttcgttggaaacgggataaaccgcacagaactaaacagaagcattctcagaaactactttgtgatgattgcattcaagtcacagagttgaacattccctttgacagagcagtttggaaactctctttgtgtagaatctgcaagtggagatatggaccgctttgaggcctatggtagtaaaggaaatagcttcatataaaagctagacagtagcatcctcagaaacttctttgtgatgcttgcattcaactcacagagttgaactttcctttcgagagagaagctttgaaacactctttttccagaatctgcaagtggacatttggagggctttgaggcctgtggtggaaaaggaattatcttcccgtaaaagctagatagaagcattgtcagaaacttctttgtgatgattgcattcaactcacagagttgaaggttccttttcaaacagcagtttccaatcactctttctgtggaatctgcaagtggatatttgggcctctctgaggatttcgttggaaacgggataaaacgcacagaactaaaacagaagcattctcagaaacttctctgtgatgtttgtgttcaactcccagagtttcacgttgcttttcatagagtagttctgaaacatgcttttcgtagtgtctgcaagtggacatttggagcgctttcaggcctgtggtggaaaacgaattatggtcacataaaaactggagagaagccttctcagaaacttctctgtgatgattgcattcaactcacagagttgaaccctcctatggatagagcagtgttgaaactctctttttgtggaatctgcaagtggatatgtggacctctccgaagatgtctttggaaacgggaatatcttcacataaaaactaaacagaagcattctcagaaacttcttggtgatgtttgcattcaaatcccagagttgaaccttcctttgatagttcaggtttgaaacactctttctgtaggatctgcaagtggctatttggaccactctgtggccttcgttcgaaacgggtatatcttcgcataaaatctagacagaagcattctcagaaaatactttgtgatgattgagtttaaatcacagagctgaccattcctttggatggagcaggtttgagacacactttttgtagaatctacaagtggatatttggacctctctgaggatttcgttggaaacgggataactgcacctaactaaacggaagcattctcagaaactgctttgtgatgattgcattcacctcacagagttgaacattcctattgatagagcagtttggaaacactcttgttgtggaatgtgcaagtggagatttggagcgctttgaggcctatggtagtaaagggaatagcttcatagaaaaactagacagatgcattctcaggaactttttggtgatgtttgtattcaactcccagagttgaactttcctttggaaagagcagctatgaaacactctttttctagaatctgcaagtggacgtttggagggctttgtggtttgtggtggaaaaggaaatatcttcacctaaatactagatagaagcattctcagaagcttctctgtgatgactgcattcaactcacggagttgaacactccttttgagagcgcagttttgaaactctctttctgtggcatccgcaaggggacatgtggacctctttgaagatttcgttggaaacggaatcatcttcacataaaaactatacagaagcagtctcagaatcttctttgtgatgtttgcattcaaatcccagagttgaaatttcctttcaaagttcacgtttgaaacactctttttgcaggatctacaagtggatatttggaccactctgtgtccttcgttcgaaacgggtatatcttcacatgacatctagacagaagctttctcagaaaattctttgggatgattgagtggaactcacagagctgaacattccttgcgatgtagcagtttagaaacacaccttctgcagaatctgcaagtgcatatttggacctctctgaggaattcgttggaaacgggataatttcagctgactaaacagaagcattctcagaaccttcttcgtgatgtctgcattcaactcacagtgtggaacctttctttgatagttcaggtttgaaacactctttttgtagaaactgcaaggggataattgcacttctttgaggcctaccatagtaaaggaaataacttcctatagaaagaagacagaagcattctcagaaccctcttcgtgatgtttgcattcaactcacagtgctgaacctttctttgatagttcagctttgaaacactcttcttgtagaaactgcaagtggatatttggtcctctctgaggatttcgttggaaaggggataaatcgcacagaactaaacagaagcattctcagagccctcttcgtgatgtttgcattcaactcacagtgctgaacctgtctttgatagtgcagctttgaaacactctttttgtagaaactgcaagtggatgtttggtcctctctgaggatttcgttggaaacgggataaaccgcacagaactaaaacagaagcattcacagaaaactcttggtgacgactgagtttaactcacagagctgaacattcctttggatggagcagtttcgaaacacactatttgtagaatgtgcaagtggatatttgggcctctctgaggatttcgttggaaacgggataaaacgcacagaactaaaacagaagcattctcagaaactactttgtgatgattgcattcaagtcacagagttgaacattccctttgacagagcagtttggaaactctctttgtgtagaatctgcaagtggagatatggaccgctttgaggcctatggtagtaaaggaaataccttcatataaaagctagacagtagcattctcagaaacttctttgtgatgcttgcattcaactcacagagttgaactttcctttcgagagagaagctttgaaacactctttttccagaatgtgcaagtggacatttggggagctttgaggcctgtggtggaaaaggaattatcttcccgtaaaagctagatagaagcattgtcagaaacttctttgtgatgattgcattcaactcacagagttgaaggttccttttcaaacagcagtttccaatcactctttctgtggaatctgcaagtggatatttcgacctctttgaagatttcgttggaaacgggagaatcttcacagaaaagctaaacagaaagcattctcagaaacttctctgtgatgtttgtgttcaactcccagagtttcacattgcttttcatagagtagttctgaaacatgcttttcgtagtgtctacaagtggacatttggagcgctttcaggcctgtggtggaaaacgaattatggtcacataaaaactggagagaagccttctcagaaacttctctgtgatgactgcattcaactcacagagttgaaccctcctatggatagagcagtgttgaaactctctttttgtggaatctgcaagcggatatgtggacctctccgaagatgtctttggaaacgggaatatcttcacataaaaactaaacagaagcattctcagaaacttcttggtgatgtttgcattcaaatcccagagttgaaccttcctttgatagttcaggtttgaaacactctttttgtaggatctgcaagtggatatttggaccactctgtggccttcgttcgaaacgggtatatcttcgcataaaatctagacagaagcattctcagaaaatactttgtgatgattgagtttaactcacagagctgaacattcctttggatggagcaggtttgagacacactttttgtagaatctacaagtggatatttggacctctctgaggatttcgttggaaacgggataactgcacctaactaaacggaagcattctcagaaactgctttgtgatgattgcattcacctcacagagttgaacattcctattgatagagcagtttggaaacactcttgttgtggaatgtgcaagtggagatttggagcgctttgaggtctatggtagtaaagggaatagcttcatagaaaaactagacagatgcattctcaggaactttttggtgatgtttgtattcaactcccagagttgaactttcctttggaaagagcagctatgaaacactctttttctagaatctgcaagtggacgtttggagggctttgtggtttgtggtggaaaaggaaatatcttcacctaaatactagatagaagcattctcagaagcttctctgtgatgactgcattcaactcacggagttgaacactccttttgagagcgcagttttgaaactctctttctgtggcatctgcaaggggatatgtagacctctttgaagatttcgttggaaacggaatcatcttcacataaaaactatacagaagcagtctcagaatcttctttgtgatgtttgcattcaaatcccagagttgaactttcctttcaaagttcacgtttgaaacactctttttgcaggatctacaagtggatatttggaccactctgtgtccttcgttcgaaacgggtataacttcacacgacatctagacagaagctttctcagaaaattctttgggatgattgagtggaactcacagagctgaacattccttgtgatggagcagtttagaaacacactttctgcagaatctgcaagtgcatatttggacctctctgaggaattcgttggaaacgggataatttcagctgactaaacagaagcattctcagaaccttcttcgtgatgtctgcattcaactcacagtgtggaacctttctttgatagttcaggtttgaaacactctttttgtagaaactgcaaggggataattgcacttctttgaggcctaccgtagtaaaggaaataacttcctatagaaagaagacagaagcattctcagaaccctcttcgtgatgtttgcattcaactcacagtgctgaacctttctttgatagttcagctttgaaacactcttcttgtagaaactgcaagtggatatttggtcctctctgaggatttcgttggaaacgggataaaccgcacagaactaaacagaaagcattctcagaaccttcttcgtgatgtttgcattcaactcacagtgttgaacctttctttgatagttcaggtttgaaacggtctttctgtagaaactgcaagtagatatttggacctctctgaggatttcgttggaaacgggataaaccgcacagaactaaaacagagcattctcagaaccctcttcgtgatgtttgcattcaactcacagtgctgaacctttctttgatagttcaggtttgaaacactctttttgtagaaactgcaagtggatatttgggcctctctgaggatttcattggaaacgggataaaccgcacagaactaaacagaagcattctcagaaccttcttcgtgatgtttgcattcaaatcacagtgctgaacgtttctttgatagttcagctatgaaacactctttttgtagaaactgcaagtggatatttggacctctctgaggatttcattggaaacgggataaaccacacagaactaaaacagaagcattctcagaaccttcttcgtgatgtttgcattcaactcacaagtgttgaacctttctttgatagttcaggtttgaaacggtctttctgtagaaactgcaagtagatatttggacctctctgaggatttcgttggaaacgggataacccgcacagaactaaaacagaagcattcacagaaaactcttggtgacgactgagtttaactcacagagctgaacattcctttggatggagcagtttcgaaacacactatttgtagaatgtgcaagtggatatgtgggcctctctgaggatttcgttggaaacgggataaaccgcacagaactaaacagaagcattctcagaaactactttgtgatgattgcatgcaagtcacagagttgaacattccctttgacagagcagtttggaaactctctttgcgtagaatctgcaagtggagatatggaccgctttgaggcctatggtagtaaaggaaatagcttcatataaaagctagacagcagcattctcagaaacttctttgtgatgcttgcattcaactcacagagttgaactttcctttcgagagagaagctttgaaacactctttttccagaatctgcaagtggacatttggagggctttgaggcctgtggtggaaaaggaattatcttcccgtaaaagctagatagaagcattgtcagaaacttctttgtgatgattgcattcaactcacagagttgaaggttccttttcaaagagcagtttccaatcactctttgtgtggaatctgcaagtggatatttggacctattttgaagatttcgttggaaacgggagaatcttcacaggaaagctaaacagaagcattctcagaaacttctctgtgatgtttgtgttcaactcccagagtttcacattgcttttcatagagtagttctgaaacatgcttttcgtagtgtctacaagtggacatttggagcgctttcaggcctgtggtggaaaacgaattatggtcacataaaaactggagagaagacttctcagaaacttctctgtgatgattgcattcaactcacagagttgaaccctcctatggatagagcagtgttgaaactctctttttgtggaatctgcaagtggatatgtggacctctccgaagatgtctttggaaacgggaatatcttcacataaaaactaaacagaagcattctcagaaacttcttggtgatgtttgcattcaaatcccagagttgaaccttcctttgatagttcaggtttgaaacactctttttgtaggatctgcaagtggatatttggaccactctgtggccttcgttcgaaacgggtatatcttcgcataaaatctagacagaagcattgtcagaaaatactttgtgatgattgagtttaaatcacagagctgaacattcctttggatggagcaggtttgagacacactttttgtagaatctacaagtggatatttggacctctctgaggatttcgttggaaacgggataactgcacctaactaaacggaagcattctcagaaactgctttgtgatgattgcattcacctcacagagttgaacattcctattgatagagcagtttggaaacactcttgttgtggaatgtgcaagtggagatttggagcgctttgaggcctatggtagtaaagggaatagcttcatagaaaaactagacagatgcattctcaggaactttttggtgatgtttgtattcaactcccagagttgaactttcctttggaaagagcagctatgaaacactgtttttctagaatctgcaagtggacgtttggagggctttgtggtttgtggtggaaaaggaaatatcttcacctaaatactagatagaagcatcctcagaagcttctctgtgatgactgcattcaactcacggagttgaacactccttttgagagcgcagttttgaaactctctttctgtggcatctgcaaggggacatgtagacctctttgaagatttcgttggaaacggaatcatcttcacataaaaactacacagaagcagtctcagaatcttctttgtgatgtttgcattcaaatccccgagttgaactttcctttcaaagttcacgtttgaaacactctttttgcaggatctacaagtggatatttggaccactctgtgtccttcgatcgaaacgggtatatcttcacatgacatctagacagaagctttctcagaaaattctttgggatgattgagttgaactcacagagctgagcattccttgcgatgtagcagtttagaaacacactttctgcagaatctgcaagtgcatatttggacctctgtgaggaattcgttggaaacgggataatttcagctgactaaacagaagcattctcagaaccttcttcgtgatgtctgcattcaactcacagtgtggaacctttctttgatagttcaggtttgaaacactctttttgtagaaactgcaaggggataattgcactctttgaggagtaccgtagtaaaggaaataacttcctataaaaagaagacagaagcattctcagaaccctcttcgtgatgtttgcattcaactcacagtgctgaacctttctttgatagttcagctttgaaacactctttttgtagaaactgcaagtggatatttggtcctctctgaggatttcgttggaaacgggataaactgcacagaactaaacagaagcattctcagaaccttcttcgtgatgtttgcattcaactcacagtgttgaacctttctttgatagttcaggtttgaaacggtctttctgtagaaactgcaagtagatatttggacctctctgaggatttcgttggaaacgggataaaccgcacagaactaaaacagaagcattcacagaaaactcttggtgacgactgagtttaactcacagaactgaacattcctttggatggagcagtttcgaaacacactatttgtagaatgtgcaagtggatatgtgggcctctctgaggatttcgttggaaacgggataaaccgcacagaactaaacagaagcattctcagaaactactttgtgatgattgcattcaagtcacagagttgaacattccctttgacagagcagtttggaaactctctttgtgtagaatctgcaagtggagatatggaccgctttgaggcctatggtagtaaaggaaatagcttcatataaaagctagacagtagcattctcagaaacttctttgtgatgcttgcattcaactcacagagttgaactttcctttcgagagagaagctttgaaacactctttttccagaatctgcaagtggacatttggagggctttgaggcctgtggtggaaaaggaattatcttcccgtaaaagctagatagaagcattgtcagaaacttctttgtgatgattgcattcaactcacagagatgaaggttcctttacaaacagcagtttccaaacactctttctgtggaatctgcaagtggatatttggacctctttgaagatttcgttggaaacgggagaatcttcacagaaaagctaaacagaagcattctcagaaacttctctgtgatgtttgtgttcaactcccagagtttcacattgcttttcatagagtagttctgaaacatgcttttcgtagtgtctacaagtggacatttggagcgctttcaggcctgtggtggaaaacgaattatggtcacataaaaactggagagaagccttctcagaaacttctctgtgatgattgcattcaactcacagagttgaaccctcctatggatagagcagtgttgaaactctctttttgtggaatctgcaagtggatatgtggacctctccgaagatgtctttggaaacgggaatatcttcacataaaaactaaacagaagcattctcagaaacttcttggtgatgtttgcattcaaatcccagagttgaaccttcctttgatagttcaggtttgaaacactctttttgtaggatctgcaagtggatatttggaccactctgtggccttcgttcgaaacgggtatatcttcgcataaaatctagacagaagcattctcagaaaatactttgtgatgattgagtttaactcacagagctgaacattcctttggatggagcaggtttgagacacactttttgtagaatctacaagtggatatttggacctctctgaggatttcgttggaaacgcgataactgcacctaactaaacggaagcattctcagaaactgctttgtgatgattgcattcacctcacagagttgaacattcctattgatagagcagtttggaaacactcttgttgtggaatgtgcaagtggagatttggagcgctttgaggcctatggtagtaaagggaatagcttcatagaaaaactagacagatgcattctcaggaactttttggtgacgtttgtattcaactcccagacttgaactttcctttggaaagagcagctatgaaacactctttttctagaatctgcaagtggacgtttggagggctttgtggtttgtggtggaaaaggaaatatcttcacctaaatactagatagaagcattctcagaagcttctctgtgatgactgcattcaactcacggagttgaacactccttttgagagcgcagttttgaaactctctttctgtggcatctgcaaggggacatgtagacctctttgaagatttcgttggaaacggaatcatcttcacataaaaactatacagaagcagtctcagaatcttctttgtgatgtttgcattcaaatcccagagttgaactttactttcaaagttcacgtttgaaacactctttttgcaggatctacaagtggatatttggaccactctgtgtccttcgttcgaaacgggtatatcttcacacgacatctagacagaagctttctcagaaaattctttgggatgattgagtggaactcacagagctgaacattccttgcgatggagcagtttagaaacacactttctgcagaatctgcaagtgcatatttggacctctctgaggaattcgttggaaacgggataatttcagctgactaaacagaagcattctcagaaccttcttcgtgatgtctgcattcaactcacagtgtggaacctttctttgatagttcaggtttgaaacactctttttgtagaaactgcaaggggataattgcacttctttgaggcctaccgtagtaaaggaaataacttcctatagaaagaagacagaagcattctcagaaccctcttcgtgatgtttgcattcaactcacagtgctgaacctttctttgatagttcagctttgaaacactcttcttgtagaaactgcaagtggatatttggtcctctctgaggatttcgttggaaacgggataaaccgcacagaactaaacagaagaattctcagagccctcttcgtgatgtttgcattcaactcacagtgctgaacctttctttgatagtgcagctttgaaacactctttttgtagaaactgcaagtggatgtttggtcctctctgaggatttcgttggaaacgggataaaccgcacagaactaaaacagaagcattgtcagaaacttctttgtgatgattgcattcaactcacagagttgaaggttccttttcaaacagcagtttccaatcactctttctgtggaatctgcaagtggatatttgggcctctctgaggatttcgttggaaacgggataaaacgcacagaactaaaacagaagcattctcagaaacttctctgtgatgtttgtgttcaactcccagagtttcacgttgcttttcatagagtagttctgaaacatgcttttcgtagtgtctgcaagtggacatttggagcgctttcaggcctgtggtggaaaacgaattatggtcacataaaaactggagagaaagccttctcagaaacttctctgtgatgattgcattcaactcacagagttgaaccctcctatggatagagcagtgttgaaactctctttttgtggaatctgcaagtggatatgtggacctctccgaagatgtctttggaaacgggaatatcttcacataaaaactaaacagagcattctcagaaacttcttggtgatgtttgcattcaaatcccagagttgaaccttcctttgatagttcaggtttgaaacactctttttgtaggatctgcaagtggatatttggaccactctgtggcctttgttcgaaacgggtacatcttcgcataaaatctagacagaagcattctcagaaaatactttgtgatgattgagtttaaatcacagagctgaccattcctttggatggagcaggtttgagacacactttttgtagaatctacaagtggatatttggacctctctgaggatttcgttggaaacgggataactgcacctaactaaacggaagcattctcagaaactgctttgtgatgattgcattcacctcacagagttgaacattcctattgatagagcagtttggaaacactcttgttgtggaatgtgcaagtggagatttggagcgctttgaggcctgtggtagtaaagggaatagcttcatagaaaaactagacagatgcattctcaggaactttttggtgatgtttgtattcaactcccagagttgaactttcctttggaaagagcagctatgaaacactctttttctagaatctgcaagtggacgtttggagggctttgtggtttgtggtggaaaaggaaatatcttcacctaaatactagatagaagcattctcagaagcttctctgtgatgactgcattcaactcacggagttgaacactccttttgagagcgcagttttgaaactctctttctgtggcatctgcaaggggacatgtagacctctttgaagatttcgttggaaacggaatcatcttcacataaaaactatacagaagcagtctcagaatcttctttgtgatgtttgcattcaaatcccagagttgaactttcctttcaaagttcacgtttgaaacactctttttgcaggatctacaagtggatatttggaccactctgtgtccttcgttcgaaacgggtatatcttcacatgacatctagacagaagctttctcagaaaattctttgggatgattgagtggaactcacagagctgaacattcctttcgatgtagcagtttagaaacacactttctgcagaatctgcaagtgcatatttggacctctctgaggaattcgttggaaacgggataatttcacctgactaaacagaagcattctcagaaccttcttcgtgatgtctgcattcaactcacagtgtggaacctttctttgatagttcaggtttgaaacactctttttgtagaaactgcaaggggataattgcacttctttgaggcctaccgtagtaaaggaaataacttcctataaaaagaagacagaagcattctcagaaccctcttcgtgatgtttgcattcaactcacagtgctgaacctttctttgatagttcagctttgaaacactctttttgtagaaactgcaagtggatatttggtcctctctgaggaattcgttggaaacgggatatactgcacagaactaaacagaagcattctcagaaccttcttcgtgatgtttgcattcaactcacagtgttgaacctttctttgatagttcaggtttgaaacggtctttctgtagaaactgcaagtagatatttggacctctctgaggatttcgttggaaacgggataacccgcacagaactaaaacagaagcattcacagaaaactcttggtgacgactgagtttaactcacagagctgaacattcgtttggatggagcagtttcgaaacacactatttgtagaatgtgcaagtggatatgtgggcctctctgaggatttcgttggaaacgggataaaccgcacagaactaaacagaagcattctcagaaactactttgtgatgattgcattcaagtcacagagttgaacattccctttgacagagcagtttggaaactctctttgtgtagaatctgcaagtggagatatggaccgctttgaggactatggtagtaaaggaaatagcttcatataaaagctagacagtagcattctcagaaacttctttgtgatgcttgcattcaactcacagagttgaactttcctttcgagagagaagctttgaaacactctttttccagaatctgcaagtggacatttggagggctttgaggcctgtggtggaaaaggaattatcttcccgtaaaagctagatagaagcattgtcagaaacttctttgtgatgattgcattcaactcacagagttgaaggttccttttcaaagagcagtttccaatcactctttctgtggaatctgcaagtggatatttggacctattttgaagatttcattggaaacgggagaatcttcacaggaaagctaaacagaagcattctcagaaacttctctgtgatgtttgtgttcaactcccagagtttcacattgcttttcatagagtagttctgaaacatgcttttcgtagtgtctacaagtggacatttggagcgctttcaggcctgtggtggaaaacgaattatggtcacataaaaactggagagaagccttctcagaaacttctctgtgatgattgcattcaactcacagagttgaaccctcctatggatagagcagtgttgaaactctctttttgtggaatctgcaagtggatatgtggacctctccgaagatgtctttggaaacgggaatatcttcacataaaaactaaacagaagcattctcagaaacttcttggtgatgtttgcattcaaatcccagagttgaaccttcctttgatagttcaggtttgaaacactctttttgtaggatctgcaagtggatatttggaccactctgtggccttcgttcgaaacgggtatatcttcgcataaaatctagacagaagcattctcagaaaatactttgtgatgattgagtttaactcacagagctgaacattcctttggatggagcaggtttgagacacactttttgtagaatctacaagtggatatttggacctctctgaggatttcgttggaaacgggataactgcacctaactaaacggaagcattctcagaaactgctttgtgatgattgcattcacctcacagagttgaacattcctattgatagagcagtttggaaacactcttgttgtggaatgtgcaagtggagatttggagcgctttgaggcctatggtagtaaagggaatagcttcatagaaaaactagacagatgcattctcaggaactttttggtgatgtttgtattcaactcccagagttgaactttcctttggaaagagcagctatgaaacactctttttctagaatctgcaagtggacgtttggagggctttgtggtttgtggtggaaaaggaaatatcttcacctaaatactagatagaagcattctcagaagcttctctgtgatgactgcattcaactcacggagttgaacactccttttgagagcgcagttttgaaactctctttctgtggcatctgcaaggggacatgtagacctctttgaagatttcgttggaaacggaatcatcttcacataaaaactatacagaagcagtctcagaatcttctttgtgatgtttgcattcaaatcccagagttgaactttcctttcaaagttcacgtttgaaacactctttttgcaggatctacaagtggatatttggaccactctgtgtccttcgttcgaaacgggtatatcttcacacgacatctagacagaagctttctcagaaaattctttgggatgattgagtggaactcacagagctgaacattccttgcgatgtagcagtttagaaacacactttctgcagaatctgcaagtgcatatttggacctctctgaggaattcgttggaaacgggataatttcagctgactaaacagaagcattctcagaaccttcttcgtgatgtctgcattcaactcacagtgtggaacctttctttgatagttcaggtttgaaacactctttttgtagaaactgcaaggggataattgcacttctttgaggcctaccgtagtaaaggaaataacttcctatagaaagaagacagaagcattctcagaaccctcttcgtgatgtttgcattcaactcacagtgctgaacctttctttgatagttcagctttgaaacactcttcttgtagaaactgcaagtggatatttggtcctctctgaggatttcgttggaaacgggataaaccgcacagaactaaacagaagaattctcagagccctcttcgtgatgtttgcattcaactcacagtgctgaacctttctttgatagtgcagctttgaaacactctttttgtagaaactgcaagtggatgtttggtcctctctgaggatttcgttggaaacgggataaaccgcacagaactaaaacagaagcattgtcagaaacttctttgtgatgattgcattcaactcacagagttgaaggttccttttcaaacagcagtttccaatcactctttctgtggaatctgcaagtggatatttgggcctctctgaggattttgttggaaacgggataaaacgcacagaactaaaacagagagcattctcagaaacttctctgtgatgtttgtgttcaactcccagagtttcacgttgcttttcatagagtagttctgaaacatgcttttcgtagtgtctgcaagtggacatttggagcgctttcaggcctgtggtggaaaacgaattatggtcacataaaaactggagagagctttctcagaaacttctctgtgatgattgcattcaactcacagagttgaaccctcctatggatagagcagtgttgaaactctctttttgtggaatctgcaagtggatatgtggacctctccgaagatgtctttggaaacgggaatatcttcacataataactaaacggaagcattctcagaaacttcttggtgatgtttgcattcaaatcccagagttgaaccttcctgtgatagttcaggtttgaaacactctttttgtaggatctgcaagtggctatttggaccactctgtggccttcgttcgaaacgggtatatcttcgcataaaatctagacagaagcattctcagaaaatactttgtgatgattgagttaaaatcacagagctgaacattcctttggatggagcaggtttgagacacactttttgtagaatctacaagtggatatttggacctctctgaggatttcgttggaaacgggataactgcacctaactaaacggaagcattctcagaaactgctttgtgatgattgcattcacctcacagagttgaacattcctattgatagagcagtttggaaacactcttgttgtggaatgtgcaagtggagatttggagcgctttgaggcctatggtagtaaagggaatagcttcatagaaaaactagacagatgcattctcaggaaccttttggtgatgtttgtattcaactcccagagttgaactttcctttggaaagagcagctatgaaacactctttttctagaatctgcaagtggacgtttggagggctttgtggtttgtggtggaaaaggaaatatcttcacctaaatactagatagaagcattctcagaagcttctctgtgatgactgcattcaactcacggagttgaacactccttttgagagcgcagttttgaaactctctttctgtggcatctgcaaggggacatgtagacctctttgaagatttcgttggaaacggaatcatcttcacataaaaactatacagaagcagtctcagaatcttctttgtgatgtttgcattcaaatcccagagttgaactttcctttcaaagttcacgtttgaaacactctttttgcaggatctacaagtggatatttggaccactctgtgtccttcgttcgaaacgggtatatcttcacacgacatctagacagaagctttctcagaaaattctttgggatgattgagtggaactcacagagctgaacattccttgcgatgtagcagtttagaaacacactttctgcagaatctgcaagtgcatatttggacctctctgaggaattcgttggaaacgggataatttcagctgactaaacagaagcattctcagaaccttcttcgtgatgtctgcattcaactcacagtgtggaacctttctttgatagttcaggtttgaaacactctttttgtagaaactgcaaggggataattgcacttctttgaggcctaccgtagtaaaggaaataacttcttatagaaagaagacagaagcattctcagaaccctcttcgtgatgtttgcattcaactcacagtgctgaacctttctttgatagttcagctttgaaacactcttcttgtagaaactgcaagtggatatttggtcctctctgaggatttcgttggaaacgggataaaccgcacagaactaaacagaagaattctcagagccctcttcgtgatgtttgcattcaactcacagtgctgaacctttctttgatagtgcagctttgaaacactctttttgtagaaactgcaagtggatgtttggtcctctctgaggatttcgttggaaacgggataaaccgcacagaactaaaacagaagcattgtcagaaacttctttgtgatgattgcattcaactcacagagttgaaggttccttttcaaacagcagtttccaatcactctttctgtggaatctgcaagtggatatttgggcctctctgaggatttcgttggaaacgggataaaacgcacagaactaaaacagaagcattctcagaaacttctctgtgatgtttgtgttcaactcccagagtttcacgttgcttttcatagagtacttctgaaacatgcttttcgtagtgtctgcaagtggacatttggagcgctttcaggcctgtggtggaaaacgaattatggtcacataaaaactggagagaagccttctcagaaacttctctgtgatgattgcattcaactcacagagttgaaccctcctatggatagagcagtgttgaaactctctttttgtggaatctgcaagtggatatgtggacctctccgaagatgtctttggaaacgggaatatcttcacataaaaactaaacagaaagcattctcagaaacttcttggtgatgtttgcattcaaatcccagagttgaaccttcctttgatagttcaggtttgaaacactctttttgtaggatctgcaagtggatatttggaccactctgtggccttcgttcgaaacgggtacatcttcgcataaaatctagacagaagcattctcagaaaataatttgtgatgattgagttgaactcacagagctgaacattcctttggatggagcaggtttgagacacactttttgtagaatctacaagtggatatttggacctctctgaggatttcgttggaaacgggataactgcacctaactaaacggaagcattctcagaaactgctttgtcatgattgcattcacctcacagagttgaacattcctattgatagagcagtttggaaaaactcttgttgtggaatgcgcaagtggagatttggagcgctttgaggcctatggtagtaaagggaatagcttcatagaaaaagtagacagatgcattctcaggaactttttggtgatgtttgtattcaactcccagagttgaactttcctttggaaagagcagctatgaaacactctttttctagaatctgcaagtggacgtttggagggctttgtggtttgtggtggaaaaggaaatatcttcacctaaatactagatagaagcattctcagaagcttctctgtgatgactgcattcaactcacggagttgaacactccttttgagagcgcagttttgaaactctctttctgtggcatctgcaaggggacatgtagacctctttgaagatttcgttggaaacggaatcatcttcacataaaaactatacagaagcagtctcagaatcttctttgtgatgtttgcattcaaatcccagagttgaactttcctttcaaagttcacgtttgaaacactctttttgcaggatctacaagtggatatttggaccactctgtgtccttcgttcgaaacgggtatatcttcacacgacatctagacagaagctttctcagaaaattctttgggatgattgagtggaactcacagagctgaacattccttgcgatgtagcagtttagaaacacactttctgcagaatctgcaagtgcatatttggacctctctgaggaattcgttggaaacgggataatttcagctgactaaacagaagcattctcagaaccttcttcgtgatgtctgcattcaactcacagtgtggaacctttctttgatagttcaggtttgaaacactctttttgtagaaactgcaaggggataattgcacttctttgaggcctaccgtagtaaaggaaataacttcctatagaaagaagacagaagcattctcagaaccctcttcgtgatgtttgcattcaactcacagtgctgaacctttctttgatagttcagctttgaaacactcttcttgtagaaactgcaagtggatatttggtcctctctgaggatttcgttggaaacgggataaaccgcacagaactaaacagaagaattctcagagccctcttcgtgatgtttgcattcaactcacagtgctcaacctttctttgatagtgcagctttgaaacactctttttgtagaaactgcaagtggatatttggtcctctctgaggatttcgttggaaacgggataaaccgcacagaactaaaacagaagcattgtcagaaacttctttgtgatgattgcattcaactcacagagttgaaggttccttttcaaacagcagtttccaatcactctttctgtggaatctgcaagtggatatttgggcctctctgaggatttcgttggaaacgggataaaacgcacagaactaaaacagaagcattctcagaaacttctctgtgatgtttgtgttcaactcccagagtttcacgttgcttttcatagagtacttctgaaacatgcttttcgtagtgtctgcaagtggacatttggagcgctttcaggcctgtggtggaaaacgaattatggtcacataaaaactggagagaagccttctcagaaacttctctgtgatgattgcattcaactcacagagttgaaccctcctatggatagagcagtgttgaaactctctttttgtggaatctgcaagtggatatgtggacctctccgaagatgtctttggaaacgggaatatcttcacataaaaactaaacagaagcattctcagaaacttcttggtgatgtttgcattcaaatcccagagttgaaccttcctttgatagttcaggtttgaaacactctttctgtaggatctgcaagtggctatttggaccactctgtggccttcgttcgaaacgggtatatcttcgcataaaatctagacagaagcattctcagaaaatactttgtgatgattgagtttaaatcacagagctgaccattcctttggatggagcaggtttgagacacactttttgtagaatctacaagtggatatttggacctctctgaggatttcgttggaaacgggataactgcacctaactaaacggaagcattctcagaaactgctttgtgatgattgcattcacctcacagagttgaacattcctattgatagagcagtttggaaacactcttgttgtggaatgtgcaagtggagatttggagcgctttgaggcctgtggtagtaaagggaatagcttcatagaaaaactagacagatgcattctcaggaactttttggtgatgtttgtattcaactcccagagttgaactttcctttggaaagagcagctatgaaacactctttttctagaatctgcaagtggacgtttggagggctttgtggtttgtggtggaaaaggaaatatcttcacctaaatactagatagaagcattctcagaagcttctctgtgatgactgcattcaactcacggagttgaacactccttttgagagcgcagttttgaaactctctttctgtggcatctgcaaggggacatgtagacctctttgaagatttcgttggaaacggaatcatcttcacataaaaactatacagaagcagtctcagaatcttctttgtgatgtttgcattcaaatcccagagttgaactttcctttcaaagttcacgtttgaaacactctttttgcaggatctacaagtggatatttggaccactctgtgtccttcgttcgaaacgggtatatcttcacacgacatctagacagaagctttctcagaaaattctttgggatgattgagtggaactcacagagctgaacattccttgcgatggagcagtttagaaacacactttctgcagaatctgcaagtgcatatttggacctctctgaggaattcgttggaaacgggataatttcagctgactaaacagaagcattctcagaaccttcttcgtgatgtctgcattcaactcacagtgtggaacctttctttgatagttcaggtttgaaacactctttttgtagaaactgcaaggggataattgcacttctttgaggcctaccgtagtaaaggaaataacttcctatagaaagaagacagaagcattctcagaaccctcttcgtgatgtttgcattcaactcacagtgctgaacctttctttgatagttcagctttgaaacactcttcttgtagaaactgcaagtggatatttggtcctctctgaggatttcgttggaaacgggataaaccgcacagaactaaacagaagaattctcagagccctcttcgtgatgtttgcattcaactcacagtgctgaacctttctttgatagtgcagctttgaaacactctttttgtagaaactgcaagtggatgtttggtcctctctgaggatttcgttggaaacgggataaaccgcacagaactaaaacagaagcattgtcagaaacttctttgtgatgattgcattcaactcacagagttgaaggttccttttcaaacagcagtttccaatcactctttctgtggaatctgcaagtggatatttgggcctctctgaggatttcgttggaaacgggataaaacgcacagaactaaaacagaagcattctcagaaacttctctgtgatgtttgtgttcaactcccagagtttcacgttgcttttcatagagtagttctgaaacatgcttttcgtagtgtctgcaagtggacatttggagcgctttcaggcctgtggtggaaaacgaattatggtcacataaaaactggagagaagccttctcagaaacttctctgtgatgattgcattcaactcacagagttgaaccctcctatggatagagcagtgttgaaactctctttttgtggaatctgcaagtggatatgtggacctctccgaagatgtctttggaaacgggaatatcttcacataaaaactaaacagaagcattctcagaaacttcttggtgatgtttgcattcaaatcccagagttgaaccttcctttgatagttcaggtttgaaacactctttctgtaggatctgcaagtggctatttggaccactctgtggccttcgttcgaaacgggtatatcttcgcataaaatctagacagaagcattctcagaaaatactttgtgatgattgagtttaaatcacagagctgaccattcctttggatggagcaggtttgagacacactttttgtagaatctacaagtggatatttggacctctctgaggatttcgttggaaacgggataactgcacctaactaaacggaagcattctcagaaactgctttgtgatgattgcattcacctcacagagttgaacattcctattgatagagcagtttggaaacactcttgttgtggaatgtgcaagtggagatttggagcgctttgaggcctatggtagtaaagggaatagcttcatagaaaaactagacagatgcattctcaggaactttttggtgatgtttgtattcaactcccagagttgaactttcctttggaaagagcagctatgaaacactctttttctagaatctgcaagtggacgtttggagggctttgtggtttgtggtggaaaaggaaatatcttcacctaaatactagatagaagcatcctcagaagcttctctgtgatgactgcattcaactcacggagttgaacactccttttgagagcgcagttttgaaactctctttctgtggcatctgcaaggggacatgtagacctctttgaagatttcgttggaaacggaatcatcttcacataaaaactatacagaagcagtctcagaatcttctttgtgatgtttgcattcaaatcccagagttgaactttcctttcaaagttcacgtttgaaacactctttttgcaggatctacaagtggatatttggaccactctgtgtccttcgttcgaaacgggtatatcttcacacgacatctagacagaagctttctcagaaaattctttgggatgattgagtggaactcacagagctgaacattccttgcgatgtagcagtttagaaacacactttctgcagaatctgcaagtgcatatttggacctctccgaggaattcgttggaaacgggataatttcagctgactaaacagaagcattctcagaaccttcttcgtgatgtctgcattcaactcacagtgtggaacctttctttgatagttcaggtttgaaacactctttttgtagaaactgcaaggggataattgcacttctttgaggcctaccgtagtaaaggaaataacttcctatagaaagaagacagaagcattctcagaaccctcttcgtgatgtttccattcaactcacagtgctgaacctttctttgatagttcagctttgaaacactcttcttgtagaaactgcaagtggatatttggtcctctctgaggatttcgttggaaacgggataaaccgcacagaactaaacagaagcattcacagaaaactcttggtgacgactgagtttaactcacagagctgaacattcctttggatggagcagtttcgaaacacactatttgtagaatgtgcaagtggatatttgggcctctctgaggatttcgttggaaacgggataaaccgcacagaactaaacagaagcattctcagaaactactttgtgatgattgcattcaagtcacagagttgaacattccctttgacagagcagtttggaaactctctttgtgtagaatctgcaagtggagatatggaccgctttgaggcctatggtagtaaaggaaatagcttcatataaaagctagacagtagcattctcagaaacttctttgtgatgcttgcattcaactcacagagttgaactttcctttcgagagagaagctttgaaacactctttttccagaatctgcaagtggacatttggagggctttgaggcctgtggtagaaaaggaattaacttcccgtaaaagctagatagaagcattgtcagaaacttctttgtgatgattgcattcaactcacagagatgaaggttcctttacaaacagcagtttccaaacactctttctgtggaatctgcaagtggatatttggacctctttgaagatttcgttggaaacgggagaatcttcacagaaaagctaaacagaagcattctcagaaacttctctgtgatgtttgtgttcaactcccagagtttcacattgcttttcatagagtagttctgaaacatgcttttcgtagtgtctgcaagtggacatttggagcgctttcaggcctgtggtggaaaacgaattatggtcccataaaaactggagagaagccttctcagaaacttctctgtgatgattgcattcaactcacagatttcaaccctcctatggatagagcattgttgaaactctctttttgtggaatctgcaagtggatatgtggacctctccgaagatgtctttggaaacgggaatatcttcacataaaaactaaacagaagcattctcagaaacttcttggtgatgtttgcattcaaatcccagagttgaaccttcctgtgatagttcaggtttgaaacactctttttgtaggatctgcaagtggatatttggaccactctgtggccttcgttcgaaacgggtacatcttcacataaaatctagacagaagcattctcagaaaatactttgtgatgattgagtttaactcacagagctgaacattcctttggatggagcaggtttgagacacaccttttgtagaatctacaagtggatatttggacctctctgaggatttcgttggaaacgcgataactgcacctaactaaacggaagcattctcagaaactgctttgtgatgattgcattcacctcacagagttgaccattcctattgatagagcagtttggaaacactcttgttgtggaatgtgcaagtggagatttggagcgctttgaggcctgtggtagtaaagggaatagcttcatagaaaaactagacagatgcattctcaggaactttttggtgatgtttgtattcaactcccagagttgaactttcctttggaaagagcagctatgaaacactctttttctagaatctgcaagtggacgtttggagggctttgtggtttgtggtggaaaaggaaatatacttcacctaaatactagatagaagcattctcagaagcttctctgtgatgactgcattcaactcacggagttgaacactccttttgagagcgcagttttgaaactctctttctgtggcatctgcaaggggacatgtagacctctttgaagatttcgttggaaacggaatcatcttcacataaaaactatacagaagcagtctcagaatcttctttgtgatgtttgcattcaaatcccagagttgaactttcctttcaaagttcacgtttgaaacactctttttgcaggatctacaagtggatatttggaccactctgtgtccttcgttcgaaacgggtatatcttcacaggacatctagacagaagctttctcagaaaattctttgggatgattgagtggaactcacagagctgaacattccttgcgatgtagcagtttagaaacacactttctgcagaatctgcaagtgcatatttggacctctctgaggaattcgttggaaacgggataatttcagctgactaaacagaagcattctcagaaccttcttcgtgatgtctgcattcaactcacagtgtggaacctttctttgatagttcaggtttgaaacactctttttgtagaaactgcaaggggataattgcacttctttgaggcctaccgtagtaaaggaaataacttcctatagaaagaagacagaagcattctcagaaccctcttcgtgatgtttgcattcaactcacagtgctgaacctttctttgatagttcagctttgaaacactcttcttgtagaaactgcaagtggatatttggtcctctctgaggatttcgttggaaacgggataaaccgcacagaactaaacagaagaattctcagagccctcttcgtgatgtttgcattcaactcacagtgctgaacctttctttgatagtgcagctttgaaacactctttttgtagaaactgcaagtggatgtttggtcctctctgaggatttcgttggaaacgggataaaccgcacagaactaaaacagaagcattgtcagaaacttctttgtgatgattgcattcaactcacagagttgaaggttccttttcaaacagcagtttccaatcactctttctgtggaatctgcaagtggatatttgggcctctctgaggatttcgttggaaacgggataaaacgcacagaactaaaacagaagcattctcagaaacttctctgtgatgtttgtgttcaactcccagagtttcacgttgcttttcatagagtagttctgaaacatgcttttcgtagtgtctgcaagtggacatttggagcgctttcaggcctgtggtggaaaacgaattatggtcacataaaaactggagagaagccttctcagaaacttctctgtgatgattgcattcaactcacagagttgaaccctcctatggatagagcagtgttgaaactctttttgtggaatctgcaagtggatatgtggacctctccgaagatgtctttggaaacgggaatatcttcacataaaaactaaacagaagcattctcagaaacttcttggtgatgtttgcattcaaatcccagagttgaaccttcctttgatagttcaggtttgaaacactctttctgtaggatctgcaagtggctatttggaccactctgtggccttcgttcgaaacgggtatatcttcgcataaaatctagacagaagcattctcagaaaatactttgtgatgattgagtttaaatcacagagctgaccattcctttggatggagcaggtttgagacacactttttgtagaatctacaagtggatatttggacctctctgaggatttcgttggaaacgggataactgcacctaactaaacggaagcattctcagaaactgctttgtgatgattgcattcacctcacagagttgaacattcctattgatagagcagtttggaaacactcttgttgtggaatgtgcaagtggagatttggagcgctttgaggcctatggtagtaaagggaatagcttcatagaaaaactagacagatgcattctcaggaaccttttggtgatgtttgtattcaactcccagagttgaactttcctttggaaagagcagctatgaaacactctttttctagaatctgcaagtggacgtttggagggctttgtggtttgtggtggaaaaggaaatatcttcacctaaatactagatagaagcattctcagaagcttctctgtgatgactgcattcaactcacggagttgaacactccttttgagagcgcagttttgaaactctctttctgtggcatctgcaaggggacatgtagacctctttgaagatttcgttggaaacggaatcatcttcacataaaaactatacagaagcagtctcagaatcttctttgtgatgtttgcattcaaatcccagagttgaactttcctttcaaagttcacgtttgaaacactctttttgcaggatctacaagtggatatttggaccactctgtgtccttcgttcgaaacgggtatatcttcacacgacatctagacagaagctttctcagaaaattctttgggatgattgagtggaactcacagagctgaacattccttgcgatgtagcagtttagaaacacactttctgcagaatctgcaagtgcatatttggacctctctgaggaattcgttggaaacgggataatttcagctgactaaacagagcattctcagaaccttcttcgtggtgtctgcattcaactcacagtgtggaacctttctttgatagttcaggtttgaaacactctttttgtagaaactgcaaggggataattgcacttctttgaggcctaccgcagtaaaggaaataacttcctatagaaagaagacagaagcattctcagaaccctcttcgtgatgtttgcattcaactctcagtgctgaacctttctttgatagttcagctttgaaacactcttcttgtagaaactgcaagtggatatttggtcctctctgaggatttcgttggaaacgggataaaccgcacagaactaaacagaagaattctcagagccctcttcgtgatgtttgcattcaactcacagtgctgaacctttctttgatagtgcagctttgaaacactctttttgtagaaactgcaagtggatgtttggtcctctctgaggatttcgttggaaacgggataaaccgcacagaactaaaacagaagcattgtcagaaacttctttgtgatgattgcattcaactcacagagttgaaggttccttttcaaacagcagtttccaatcactctttctgtggaatctgcaagtggatatttgggcctctctgaggatttcgttggaaacgggataaaacgcacagaactaaaacagaagcattctcagaaacttctctgtgatgtttgtgttcaactcccagagtttcacgttgcttttcatagagtagttctgaaacatgcttttcgtagtgtctgcaagtggacatttggagcgctttcaggcctgtggtggaaaacgaattatggtcacataaaaactggagagaagccttctcagaaacttctctgtgatgattgcattcaactcacagagttgaaccctcctatgggtagagcagtgttgaaactctctttttgtggaatctgcaagtggatatgtggacctctccgaagatgtctttggaaacgggaatatcttcacataaaaactaaacagaagcattctcagaaacttcttggtgatgtttgcattcaaatcccagagttgaaccttcctttgatagttcaggtttgaaacactctttctgtaggatctgcaagtggctatttggaccactctgtggccttcgttcgaaacgggtatatcttcgcataaaatctagacagaagcattctcagaaaatactttgtgatgattgagtttaaatcacagagctgaccattcctttggatggagcaggtttgagacacactttttgtagaatctacaagtggatatttggacctctctgaggatttcgttggaaacgggataactgcacctaactaaacggaagcattctcagaaactgctttgtgatgattgcattcacctcacagagttgaacattcctattgatagagcagtttggaaacactcttgttgtggaatgtgcaagtggagatttggagcgctttgaggcctgtggtagtaaagggaatagcttcatagaaaaactagacagatgcattctcaggaactttttggtgatgtttgtattcaactcccagagttgaactttcctttggaaagagcagctatgaaacactctttttctagaatctgcaagtggacgtttggagggctttgtggtttgtggtggaaaaggaaatatcttcacctaaatactagatagaagcattctcagaagcttctctgtgatgactgcattcaactcacggagttgaacactccttttgagagcgtagttttgaaactctctttctgtggcatctgcaaggggacatgtagacctctttgaagatttcgttggaaacggaatcatcttcacataaaaactatacagaagcagtctcagaatcttctttgtgatgtttgcattcaaatccccgagttgaactttcctttcaaagttcacgtttgaaacactctttttgcaggatctacaagtggatatttggaccactctgtgtccttcgttcgaaacggttatatcttcacatgacatctagacagaagctttctcagaaaattctttgggatgattgagttgaactcacagcagctgagcattccttgtgatgtagcagtttagaaacacactttctgcagaatctgcaagtgcatatttggacctctgtgaggaattcgttggaaacgggataatttcagctgactaaacagaagcattctcagaaccttcttcgtgatgtctgcattcaactcaaagtgtggaacctttctttgatagttcaggtttgaaacactctttttgtagaaactgcaaggggatcattgcacttctttgaggcctactgtagtaaaggagataacttcctataaaaagaagacagaagcattctcagagccctcttcgtgatgtttgcattcaactcacagtgctgaacctttctttgatagtgcagctttgaaacactctttttctagaaactgcaagtggatatttggacctctctgaggatttcgttggaaactggataaaccgcacagaactaaaacagaagcattctcagaaccttcttcgtgatgtttgcattcaactcacagtgttgaacctttctttgatagttcaggtttgaaacggtctttctgtagaaactgcaagtagatatttggacctctctgaggatttcgttggaaacgggataacccgcacagaactaaaacagaagcattcacagaaaactcttggtgacgactgagtttaactcacagagctgaacattcctttggatggagcagtttcgaaacacactatttgtagaatgtgcaagtggatatttgggcctctctgaggatttcgttggaaacgggataaaccgcacagaactaaacagaagcattctcagaaactactttgtgatgattgcattcaagtcacagagttgaacattccctttgacagagcagtttggaaactctctttgtgtagaatctgcaagtggagatatggaccgctttgaggcctatggtagtaaaggaaatagcttcatataaaagctagacagtagcattctcagaaacttctttgtgatgcttgcattcaactcacagagttgaactttcctttcgagagagaagctttgaaacactctttttccagaatctgcaagtggacatttggagggctttgaggcctgtggtggaaaaggaattatcttcccgtaaaagctagatagaagcattgtcagaaacttctttgtgatgattgcattcaactcacagagttgaaggttccttttcaaagagcagtttccaatcactctttctgtggaatctgcaagtggatatttggacctattttgaagatttcgttggaaacgggagaatcttcacaggaaagctaaacagaagcattctcagaaacttctctgtgatgtttgtgttcaactcccagagtttcacattgcttttcatagagtagttctgaaacatgcttttcgtagtgtctacaagtggacatttggagcgctttcaggcctgtggtggaaaacgaattatggtcacataaaaactggagagaagccttctcagaaacttctctgtgatgattgcattcaactcacagagttgaaccctcctatggatagagcagtgttgaaactctctttttgtggaatctgcaagtggatatgtggacctctccgaagatgtctttggaaacgggaatatcttcacataaaaactaaacagaagcattctcagaaacttcttggtgatgtttgcattcaaatcccagagtcgaaccttcctttgagagttcaggtttgaaacactctttttgtaggatctgcaagtggatatttggaccactctgtggccttcgttcgaaacgggtatatcttcgcataaaatctagacagaagcattctcagaaaatactttgtgatgattgagttaaaatcacagagctgaacattcctttggatggagcaggtttgagacacactttttgtagaatctacaagtggatatttggacctctctgaggatttcgttggaaacgggataactgcacctaactaaacggaagcattctcagaaactgctttgtgatgattgcattcacctcacagagttgaacattcctattgatagagcagtttggaaacactcttgttgtggaatgtgcaagtggagatttggagcgctttgaggcctatggtagtaaagggaatagcttaatagaaaaactagacagatgcattctcaggaactttttggtgatgtttgtattcaactcccagagttgaactttcctttggaaagagcagctatgaaacactctttttctagaatctgcaagtggacttttggagggctttgtggtttgtggaggaaaaggaaatatcttcacctaaatactagatagaagcattctcagaagcttctctgtgatgactgcattcaacctcacggagttgaacactccttttgagagcgcagttttgaaactctctttctgtggcatctgcaaggggacatgcagacctctttgaagatttcgttggaaacggaatcatcttcacataaaaactatacagaagcagtctcagcatcttctttgtgatgtttgcattcaaatcccaggagttgaactttcctttcaaagttcacgtttgaaacactctttttgcaggatctacaagtggatatttggaccactctgtgtccttcgttcgaaacgggtatatcttcacatgacatctagacagaagctttctcagaaaattctttgggatgattgagttgagcaaacagagctgaacactccttgcgatgtagcagtttagaaacaccctttctgcagaatctgcaagtgcatatgtggacctctctgaggaattcgttggaaacgggataatttcagctgactaaacagaagcattctcagaaccttcttcgtgatgtctgcattcaactcacagtgtggaacctttctttgatagttcaggtttgaaacactctttttgtagagactgcaaggggatcattgcacttctttgaggcctaccgtagtaaaggaaataacttcctataaaaagaagacagaagcattctcagaaccctcttcgtgatgtttgcattcaactcacggtgctgaacctttctttgatagttcagctttgaaacactctttttgtagaaactgcaagtggatatttggtgctctctgaggatttcgttggaaacgggataaaccgcacagaactaaacagaagcattctcagaaccttcttcgtgatgtttgcattcaactcacagtgttgaacctttctttgatagttcaggttggaaacggtctttctgtagaaactgcaagtagatatttggacctctctgaggatttcattggaaacgggataaaccgcacagaactaaaacagaagcattcacagaaaactcttggtgacgactgagtttaactcacagagctgaacattcctttggatggagcagtttcgaaacacactatttgtagaatctgcaagtggatatttgggcctctctgaggatttcgttggaaacgggataaaacgcacagaactaaaacagaagcattctcagaaactactttgtgatgattgcattcaagtcacagagttgaacattccctttgacagagcagtttggaaactctctttgtgtagaatctgcaagtggagatatggaccgctttgaggcctatggtagtaaaggaaatagcttcatataaaagctagacattagcattctcagaaacttctttgtgatgcttgcattcaactcacagagttgaactttcctttcgagagagaagctttgaaacactctttttccagaatgtgcaagtggacatttggggagctttgaggcctgtggtggaaaaggaattatcttcccgtaaaagctagatagaagcattgtcagaaacttctttgtgatgattgcattcaactcacagagttgaaggttccttttcaaacagcagtttccaatcactctttctgtggaatctgcaagtggatatttcgacctctttgaagatttctttggaaacgggagaatcttcacagaaaagctaaacagaagcattctcagaaacttctctgtgatgtttgtgttcaactcccagagtttcacgttgcttttcatagagtagttctgaaacatgcttttcgtagtgtctgcaagtggacatttggagcgctttcaggcctgtggtggaaaacgaattatggtcacataaaaactggagagaagccttctcagaaacttctctgtgatgattgcattcaactcacagagttgaaccctcctatggatagagcagtgttgaaactctctttttgtggaatctgcaagtggatatgtggacctctccgaagatgtctttggaaacgggaatatcttcacataaaaactaaacagaagcattctcagaaacttcttggtgatgtttgcattcaaatcccagagttgaaccttcctttgatagttcaggtttgaaacactctttctgtaggatctgcaagtggctatttggaccactctgtggccttcgttcgaaacgggtatatcttcgcataaaatctagacagaagcattctcagaaaatactttgtgatgattgagtttaaatcacagagctgaccattcctttggatggagcaggtttgagacacactttttgtagaatctacaagtggatatttggacctctctgaggatttcgttggaaacgggataactgcacctaactaaacggaagcattctcagaaactgctttgtgatgattgcattcacctcacagagttgaacattcctattgatagagcagtttggaaacactcttgttgtggaatgtgcaagtggagatttggagcgctttgaggcctgtggtagtaaagggaatagcttcatagaaaaactagacagatgcattctcaggaactttttggtgatgtttgtattcaactcccagagttgaactttcctttggaaagagcagctatgaaacactctttttctagaatctgcaagtggacgtttggagggctttgtggtttgtggtggaaaaggaaatatcttcacctaaatactagatagaagcattctcagaagcttctctgtgatgactgcattcaactcacggagttgaacactccttttgagagcgcagttttgaaactctctttctgtggcatctgcaaggggacatgtagacctctttgaagatttcgttggaaacggaatcatcttcacataaaaactatacagaagcagtctcagaatcttctttgtgatgtttgcattcaaatcccagagttgaactttcctttcaaagttcacgtttgaaacactctttttgcaggatctacaagtggatatttggaccactctgtgtccttcgttcgaaacgggtatatcttcacacgacatctagacagaagctttctcagaaaattctttgggatgattgagtggaactcacagagctgaacattccttgcgatgtagcagtttagaaacacactttctgcagaatctgcaagtgcatatttggacctctctgaggaattcgttggaaacgggataatttcagctgactaaacagaagcattctcagaaccttcttcgtgatgtctgcattcaactcacagtgtggaacctttctttgatagttcaggtttgaaacactctttttgtagaaactgcaaggggataattgcacttctttgaggcctaccgtagtaaaggaaataacttcctatagaaagaagacagaagcattctcagaaccctcttcgtgatgtttgcattcaactcacagtgctgaacctttctttgatagttcagctttgaaacactcttcttgtagaaactgcaagtggatatttggtcctctctgaggatttcgttggaaacgggataaaccgcacagaactaaacagaagaattctcagagccctcttcgtgatgtttgcattcaactcacagtgctgaacctttctttgatagtgcagctttgaaacactctttttgtagaaactgcaagtggatgtttggtcctctctgaggatttcgttggaaacgggataaaccgcacagaactaaaacagaagcattgtcagaaacttctttgtgatgattgcattcaactcacagagttgaaggttccttttcaaacagcagtttccaatcactctttctgtggaatctgcaagtggatatttgggcctctctgaggatttcgttggaaacgggataaaacgcacagaactaaaacagaagcattctcagaaacttctctgtgatgtttgtgttcaactcccagagtttcacgttgcttttcatagagtagttctgaaacatgcttttcgtagtgtctgcaagtggacatttggagcgctttcaggcctgtggtggaaaacgaattatggtcacaaaaaaactggagagaagccttctcagaaacttctctgtgatgattgcattcaactcacagagttgaaccctcctatggatagagcagtgttgaaactctctttttgtggaatctgcaagtggatatgtggatctctccgaagatgtctttggaaacgggaatatcttcacataaaaactaaacagaagcattctcagaaacttcttggtgatgtttgcattcaaatcccagagttgaaccttcatttgatagttcaggtttgaaacactctttttgtaggatctgcaagtggctatttggaccactctgtggccttcgttcgaaacgggtatatcttcgcataaaatctagacagaagcattctcagaaaatactttgtgatgattgagtttaaatcacagagctgaccattcctttggatggagcaggtttgagacacactttttgtagaatctacaagtggatatttggacctctctgaggatttcgttggaaacgggataactgcacctaactaaacggaagcattctcagaaactgctttgtgatgattgcattcacctcacagagttgaacattcctattgatagagcagtttggaaacactcttgttgtggaatgtgcaagtggagatttggagcgctttgaggcctatggtagtaaagggaatagcttcatagaaaaactagacagatgcattctcaggaaccttttggtgatgtttgtattcaactcccagagttgaactttcctttggaaagagcagctatgaaacactctttttctagaatctgcaagtggacgtttggagggctttgtggtttgtggtggaaaaggaaatatcttcacctaaatactagatagaagcattctcagaagcttctctgtgatgactgcattcaactcacggagttgaacactccttttgagagcgcagttttgaaactctctttctgtggcatctgcaaggggacatgtagacctctttgaagatttcgttggaaacggaatcatcttcacataaaaactatacagaagcagtctcagaatcttctttgtgatgtttgcattcaaatcccagagttgaactttcctttcaaagttcacgtttgaaacactctttttgcaggatctacaagtggatatttggaccactctgtgtccttcgttcgaaacgggtatatcttcacacgacatctagacagaagctttctcagaaaattctttgggatgattgagtggaactcacagagctgaacattccttgcgatggagcagtttagaaacacactttctgcagaatctgcaagtgcatatttggacctctctgaggaattcgttggaaacgggataatttcagctgactaaacagaagcattctcagaaccttcttcgtgatgtctgcattcaactcacagtgtggaacctttctttgatagttcaggtttgaaacactctttttgtagaaactgcaaggggataattgcacttctttgaggcctaccgtagtaaaggaaataacttcctatagaaagaagacagaagcattctcagaaccctcttcgtgatgtttgcattcaactcacagtgctgaacctttctttgatagttcagctttgaaacactcttcttgtagaaactgcaagtggatatttggtcctctctgaggatttcgttggaaacgggataaaccgcacagaactaaacagaagaattctcagagccctcttcgtgatgtttgcattcaactcacagtgctgaacctttctttgatagtgcagctttgaaacactctttttgtagaaactgcaagtggatgtttggtcctctctgaggatttcgttggaaacgggataaaccgcacagaactaaaacagaagcattgtcagaaacttctttgtgatgattgcattcaactcacagagttgaaggttccttttcaaacagcagtttccaatcactctttctgtggaatctgcaagtggatatttgggcctctctgaggatttcgttggaaacgggataaaacgcacagaactaaaacagaagcattctcagaaacttctctgtgatgtttgtgttcaactcccagagtttcacgttgcttttcatagagtagttctgaaacatgcttttcgtagtgtctgcaagtggacatttggagcgctttcaggcctgtggtggaaaacgaattatggtcacataaaaactggagagaagccttctcagaaacttctctgtgatgattgcattcaactcacagagttgaaccctcctatggatagagcagtgttgaaactctctttttgtggaatctgcaagtggatatgtggacctctccgaagatgtctttggaaacgggaatatcttcacataaaaactaaacagaagcattctcagaaacttcttggtgatgtttgcattcaaatcccagagttgaaccttcctttgatagttcaggtttgaaacactctttctgtaggatctgcaagtggctatttggaccactctgtggccttcgttcgaaacgggtatatcttcgcataaaatctagacagaagcattctcagaaaatactttgtgatgattgagtttaaatcacagagctgaccattcctttggatggagcaggtttgagacacactttttgtagaatctacaagtggatatttggacctctctgaggatttcgttggaaacgggataactgcacctaactaaacggaagcattctcagaaactgctttgtgatgattgcattcacctcacagagttgaacattcctattgatagagcagtttggaaacactcttgttgtggaatgtgcaagtggagatttggagcgctttgaggcctatggtagtaaagggaatagcttcatagaaaaactagacagatgcattctcaggaactttttggtgatgtttgtattcaactcccagagttgaactttcctttggaaagagcagctatgaaacactctttttctagaatctgcaagtggacgtttggagggctttgtggtttgtggtggaaaaggaaatatcttcacctaaatactagacagaagcattctcagaagcttctctgtgatgactgcattcaactcacggagttgaacactccttttgagagcgcagttttgaaactctctttctgtggcatctgcaaggggacatgtagacctctttgaagatttcgttggaaacggaatcatcttcacataaaaactatacagaagcagtctcagaatcttctttgtgatgtttgcattcaaatcccagagttgaactttcctttcaaagttcacgtttgaaacactctttttgcaggatctacaagtggatatttggaccactctgtgtccttcgttcgaaacgggtatatcttcacacgacatctagacagaagctttctcagaaaattctttgggatgattgagtggaactcacagagctgaacattccttgcgatgtagcagtttagaaacacactttctgcagaatctgcaagtgcatatttggacctctctgaggaattcgttggaaacgggataatttcagctgactaaacagaagcattctcagaacttcttcgtgatgtctgcattcaactcacagtgtggaacctttctttgatagttcaggtttgaaacactctttttgtagaaactgcaaggggataattgcacttctttgaggcctaccgtagtaaaggaaataacttcctatagaaagaagacagaagcattctcagaaccctcttcgtgatgtttgcattcaactcacagtgctgaaactttctttgatagttcagctttgaaacactctttttgtagaaactgcaagtggatacttggtcctctctgaggatttcgttggaaaagggataaaccgcacagaactaaacagaagcattcacagaaaactcttggtgacgactgagttttactcacagagctgaacattcctttggatggagcagtttcgaaacacactatttgtagaatctgcaagtggatatttgggcctctctgaggatttcgatggaaatgggataaaccgcacagaactaaaacagaagcattctcagaaactactttgtgatgattgcattcaagtcacagagctgaacattccctttgacagagcagtttggaaactctctttgtgtagaatctgcaagtggaggtatggaatgctttgaggactattggtagtaaaggaaatagcttcatataaaagctagacagtagcattctcagaaacttctttgtgatgcttgcattcaactcacagagttgaactttcctttcgagagagaagctttgaaacactctttttccagaatctgcaagtggacatttggagggctttgaggcctgtggtggaaaaggaattatcttcccgtaaaagctagatagaagcattgtcagaaacttctttgtgatgattgcattcaagtcacagagttgaaggttccttttcaaagagcagtttccaatcactctttctgtggaatctgcaagtggatatttggacctctttgaacatttcgttggaaacgggagaatcttcacagaaaagctaaacagaggcattctcagaaacttctctgtgatgtttgtgttcaactcccagagtttcacattgcttctcatagagtagttcggaaacatgcttttcgtagtgtctgcaagtggacatttggagcgctttcaggcctgtggtggaaaacgaattatggtcacataaaaactggagagaagccttctcagaaacttctctgtgatgattgcattcaactcacagagttgaaccctcccatggatagagcagtgttgaaactctctttttgtggaatctgcaagtggatatgtggacctctccgaagatgtctttggaaacgggaatatcttcacataaaaactaaacggaagcattctcagaaacttcttggtgatgtttgcattcaaatcccagagttgaaccttcctttgatagttcaggtttgaaacactctttttgtaggatctgcaagtggctatttggaccactctgtggccttcgttcgaaacgggtatatcttcgcataaaatctagacagaagcattctcagaaaatactttgtgatgattgagtttaaatcacagagctgaccattcctttggatggagcaggtttgagacacactttttgtagaatctacaagtggatatttggacctctctgaggatttcgttggaaacgggataactgcacctaactaaacggaagcattctcagaaactgctttgtgatgattgcattcacctcacagagttgaacattcctattgatagagcagtttggaaacactcttgttgtggaatgtgcaagtggagatttggagcgctttgaggtctatggtagtaaagggaatagcttcatagaaaaactagacagatgcattctcaggaactttttggtgatgtttgtattcaactcccagagttgaactttcctttggaaagagcagctatgaaacactctttttctagaatctgcaagtggacgtttggagggctttgtggtttgtggtggaaaaggaaatatcttcacctaaatactagatagaagcattctcagaagcttctctgtgatgactgcattcaactcacggagttgaacactccttttgagagcgcagttttgaaactctctttctgtggcatccgcaaggggacatgtggacctctttgaagatttcgttggaaacggaatcatcttcacataaaaactatacagaagcaatctcagaatcttctttgtgatgtttgcattcaaatcccagagttgaactttcctttcaaagttcacgtttgaaacactctttttgcaggatctacaagtggatatttggaccactctgtgtccttcgttcgaaacgggtatatcttcacacgacatctagacagaagctttctcagaaaattctttgggatgattgagttgaactcacagagctgaacattccttgcgatgtagcagtttagaaacacactttctgcagaatctgcaagtgcatatttggacctctctgaggaattcgttggcaacgggataatttcagctgactaaacagaagcattctcagaaccttcttcgtgatgtctgcattcaactcacagtgtggaacctttctttgatagttcaggtttgaaacactctttttgtagaaactgcaaggggataattgcacttctttgaggcctaccgtagtaaaggaaataacttcctatagaaagaagacagaagcattctcagaaccctcttcgtgatgtttgcattcaactcacagtgctgaacctttctttgatagttcagctttgaaacactcttcttgtagaaactgcaagtggatatttggtcctctctgaggatttcgttggaaacgggataaaccgcacagaactaaacagaagaattctcagagccctcttcgtgatgtttgcattcaactcacagtgctgaacctttctttgatagtgcagctttgaaacactctttttgtagaaactgcaagtggatgtttggtcctctctgaggatttcgttggaaacgggataaaccgcacagaactaaaacagaagcattgtcagaaacttctttgtgatgattgcattcaactcacagagttgaaggttccttttcaaacagcagtttccaatcactctttctgtggaatctgcaagtggatatttgggcctctctgaggatttcgttggaaacgggataaaacgcacagaactaaaacagaagcattctcagaaacttctctgtgatgtttgtgttcaactcccagagtttcacgttgcttttcatagagtagttctgaaacatgcttttcgtagtgtctgcaagtggacatttggagcgctttcaggcctgtggtggaaaacgaattatggtcacataaaaactggagagaagccttctcagaaacttctctgtgatgattgcattcaactcacagagttgaaccctcctatggatagagcagtgttgaaactctctttttgtggaacctgcaagtggatatgtggacctctccgaagatgtctttggaaacgggaatatcttcacataaaaactaaacagaagcattctcagaaacttcttggtgatgtttgcattcaaatcccagagttgaaccttcctttgatagttcaggtttgaaacactctttctgtaggatctgcaagtggctatttggaccactctgtggccttcgttcgaaacgggtatatcttcgcataaaatctagacagaagcattctcagaaaatactttgtgatgattgagtttaaatcacagagctgaccattcctttggatggagcaggtttgagacacactttttgtagaatctacaagtggatatttggacctctctgaggatttcgttggaaacgggataactgcacctaactaaacggaagcattctcagaaactgctttgtgatgattgcattcacctcacagagttgaacattcctattgatagagcagtttggaaacactcttgttgtggaatgtgcaagtggagatttggagcgctttgaggcctatggtagtaaagggaatagcttcatagaaaaactagacagatgcattctcaggaactttttggtgatgtttgtattcaactcccagagttgaactttcctttggaaagagcagctatgaaacactctttttctagaatctgcaagtggacgtttggagggctttgtggtttgtggtggaaaaggaaatatcttcacctaaatactagatagaagcattctcagaagcttctctgtgatgactgcattcaactcacggagttgaacactccttttgagagcgcagttttgaaactctctttctgtggcatctgcaaggggacatgtagacctctttgaagatttcgttggaaacggaatcatcttcacataaaaactatacagaagcagtctcagaatcttctttgtgatgtttgcattcaaatcccagagttgaactttcctttcaaagttcacgtttgaaacactctttttgcaggatctacaagtggatatttggaccactctgtgtccttcgttcgaaacgggtatatcttcacacgacatctagacagaagctttctcagaaaattctttgggatgattgagtggaactcacagagctgaacattccttgcgatgtagcagtttagaaacacactttctgcagaatctgcaagtgcatatttggacctctctgaggaattcgttggaaacgggataatttcagctgactaaacagaagcattctcagaaccttcttcgtgatgtctgcattcaactcacagtgtggaacctttctttgatagttcaggtttgaaacactctttttgtagaaactgcaaggggataattgcacttctttgaggcctaccgtagtaaaggaaataacttcctatagaaagaagacagaagcattctcagaaccctcttcgtgatgtttgcattcaactcacagtgctgaacctttctttgatagttcagctttgaaacactcttcttgtagaaactgcaagtggatatttggtcctctctgaggatttcgttggaaacgggataaaccgcacagaactaaacagaagaattctcagagccctcttcgtgatgtttgcattcaactcacagtgctgaacctttctttgatagtgcagctttgaaacactctttttgtagaaactgcaagtggatgtttggtcctctctgaggatttcgttggaaacgggataaaccgcacagaactaaaacagaagcattgtcagaaacttctttgtgatgattgcattcaactcacagagttgaaggttccttttcaaacagcagtttccaatcactctttctgtggaatctgcaagtggatatttgggcctctctgaggatttcgttggaaacgggataaaacgcacagaactaaaacagaagcattctcagaaacttctctgtgatgtttgtgttcaactcccagagtttcacgttgcttttcatagagtagttctgaaacatgcttttcgtagtgtctgcaagtggacatttggagcgctttcaggcctgtggtggaaaacgaattatggtcacataaaaactggagagaagccttctcagaaacttctctgtgatgattgcattcaactcacagagttgaaccctcctatggatagagcagtgttgaaactctctttttgtggaatctgcaagtggatatgtggacctctccgaagatgtctttggaaacgggaatatcttcacataaaaactaaacagaagcattctcagaaacttcttggtgatgtttgcattcaaatcccagagttgaaccttcctttgatagttcaggtttgaaacactctttctgtaggatctgcaagtggctatttggaccactctgtggccttcgttcgaaacgggtatatcttcgcataaaatctagacagaagcattctcagaaaatactttgtgatgattgagtttaaatcacagagctgaccattcctttggatggagcaggtttgagacacactttttgtagaatctacaagtggatatttggacctctctgaggatttcgttggaaacgggataactgcacctaactaaacggaagcattctcagaaactgctttgtgatgattgcattcacctcacagagttgaacattcctattgatagagcagtttggaaacactcttgttgtggaatgtgcaagtggagatttggagcgctttgaggcctatggtagtaaagggaatagcttcatagaaaaactagacagatgcattctcaggaactttttggtgatgtttgtattcaactcccagagttgaactttcctttggaaagagcagctatgaaacactctttttctagaatctgcaagtggacgtttggagggctttgtggtttgtggtggaaaaggaaatatcttcacctaaatactagatagaagcattctcagaagcttctctgtgatgactgcattcaactcacggagttgaacactccttttgagagcgcagttttgaaactctctttctgtggcatctgcaaggggacatgtagacctctttgaagatttcgttggaaacggaatcatcttcacataaaaactatacagaagcagtctcagaatcttctttgtgatgtttgcattcaaatcccagagttgaactttcctttcaaagttcacgtttgaaacactctttttgcaggatctacaagtggatatttggaccactctgtgtccttcgttcgaaacgggtatatcttcacacgacatctagacagaagctttctcagaaaattctttgggatgattgagtggaactcacagagctgaacattccttgcgatgtagcagtttagaaacacactttctgcagaatctgcaagtgcatatttggacctctctgaggaattcgttggaaacgggataatttcagctgactaaacagaagcattctcagaaccttcttcgtgatgtctgcattcaactcacagtgtggaacctttctttgatagttcaggtttgaaacactctttttgtagaaactgcaaggggataattgcacttctttgaggcctaccgtagtaaaggaaataacttcctatagaaagaagacagaagcattctcagaaccctcttcgtgatgtttgcattcaactcacagtgctgaacctttctttgatagttcagctttgaaacactcttcttgtagaaactgcaagtggatatttggtcctctctgaggatttcgttggaaacgggataaaccgcacagaactaaacagaagaattctcagagccctcttcgtgatgtttgcattcaactcacagtgctgaacctttctttgatagtgcagctttgaaacactctttttgtagaaactgcaagtggatgtttggtcctctctgaggatttcgttggaaacgggataaaccgcacagaactaaaacagaagcattgtcagaaacttctttgtgatgattgcattcaactcacagagttgaaggttccttttcaaacagcagtttccaatcactctttctgtggaatctgcaagtggatatttgggcctctctgaggatttcgttggaaacgggataaaacgcacagaactaaaacagaagcattctcagaaacttctctgtgatgtttgtgttcaactcccagagtttcacgttgcttttcatagagtagttctgaaacatgcttttcgtagtgtctgcaagtggacatttggagcgctttcaggcctgtggtggaaaacgaattatggtcacataaaaactggagagaagccttctcagaaacttctctgtgatgattgcattcaactcacagagttgaaccctcctatggatagagcagtgttgaaactctctttttgtggaatctgcaagtggatatgtggacctctccgaagatgtctttggaaacgggaatatcttcacataaaaactaaacagaagcattctcagaaacttcttggtgatgtttgcattcaaatcccagagttgaaccttcctttgatagttcaggtttgaaacactctttttgtaggatctgcaagtggctatttggaccactctgtggccttcgttcgaaacgggtatatcttcgcataaaatctagacagaagcattctcagaaaatactttgtgatgattgagttttaatcacagagctgaacattcctttggatggagcaggtttgagacacactttttgtagaatctacaagtggatatttggacctctctgaggatttcgttggaaacgggataactgcacctaactaaacggaagcattctcagaaactgctttgtgatgattgcattcacctcacagagttgaacattcctattgatagagcagtttggaaacactcttgttgtggaatgtgcaagtggagatttggagcgctttgaggcctatggtagtaaagggaatagcttcatagaaaaactagacagatgcattctcaggaactttttggtgatgtttgtattcaactcccagagttgaactttcctttggaaagagcagctatgaaacactgtttttctagaatctgcaagtggacgtttggagggctttgtggtttgtggtggaaaaggaaatatcttcacctaaatactagatagaagcatcctcagaagcttctctgtgatgactgcattcaactcacggagttgaacactccttttgagagcgcagttttgaaactctctttctgtggcatctgcaaggggacatgtagacctctttgaagatttcgttggaaacggaatcatcttcacataaaaactacacagaagcagtctcagaatcttctttgtgatgtttgcattcaaatccccgagttgaactttcctttcaaagttcacgtttgaaacactctttttgcaggatctacaagtggatatttggaccactctgtgtccttcgatcgaaacgggtatatcttcacatgacatctagacagaagctttctcagaaaattctttgggatgattgagttgaactcacagagctgagcattccttgcgatgtagcagtttagaaacacactttctgcagaatctgcaagtgcatatttggacctctgtgaggaattcgttggaaacgggataatttcagctgactaaacagaagcattctcagaaccttcttcgtgatgtctgcattcaactcacagtgtggaacctttctttgatagttcaggtttgaaacactctttttgtagaaactgcaaggggataattgcactctttgaggagtaccgtagtaaaggaaataacttcctataaaaagaagacagaagcattctcagaaccctcttcgtgatgtttgcattcaactcacagtgctgaacctttctttgatagttcagctttgaaacactctttttgtagaaactgcaagtggatatttggtcctctctgagcatttcgttggaaacgggataaactgcacagaactaaacagaagcattctcagaaccttcttcgtgatgtttgcattcaactcacagtgttgaacctttctttgatagttcaggtttgaaacggtctttctgtagaaactgcaagtagatatttggacctctctgaggatttcgttggaaacgggataacccgcacagaactaaaacagaagcattcacagaaaactcttggtgacgactgagtttaactcacagagctgaacattcctttggatggagcagtttcgaaacacactatttgtagaatgtgcaagtggatatttaggcctctctgaggatttcgttggaaacgggataaaccgcacagaactaaacagaagcattctcagaaactactttgtgatgattgcattcaagtcacagagttgaacattccctttgacagagcagtttggaaactctctttgtgtagaatctgcaagtggagatatggaccgctttgaggcctatggtagtaaaggaaatagcttcatataaaagctagacagtagcattctcagaaacttctttgtgatgcttgcattcaactcacagagttgaactttcctttcgagagagaagctttgaaacactctttttccagaatctgcaagtggacatttggagggctttgaggcctgtggtggaaaaggaattatcttcccgtaaaagctagatagaagcattgtcagaaacttctttgtgatgattgcattcaactcaccgagttgaaggttccttttcaaacagcagtttccaatcactctttctgtggaatctgcaagtggatatttcgacctctttgaagatttcgttggaaacgggagaatcttcacagaaaagctaaacagaagcattctcagaaacttctctgtgatgtttgtgttcaactcccagagtttcacattgcttttcatagagtagttctgaaacgtgcttttcgtagtgtctgcaagtggacatttggagcgctttcaggcctgtggtggaaaacgaattatggtcacataaaaactggagagaagccttctcagaaacttctctgtgatgattgcattcaactcacagagttgaaccctcctatggatagagaagtgttgaaactctctttttgtggaatctgcaagtggatatgtggacctctccgaagttgtctttggaaacgggaatatcttcacataaaaactaaacagaagcattctcagaaacttcttggtgatgtttgcattcaaatcccagagttgaaccttcctttgatagttcaggtttgaaacactctttttgtaggatctgcaagtggatatttggaccactctgtggccttcgttcgaaacgggtacatcttcgcataaaatctagacagaagcattctcagaaaatactttgtgatgattgagtttaactcacagagctgaacattcctttggatggagcaggtttgagacacactttttgtagaatctacaagtggatatttggacctctctgaggatttcgttggaaacgggataactgcacctaactaaacggaagcattctcagaaactgctttgtgatgattgcattcacctcacagagttgaacattcctattgatagagcagtttggaaacactcttgttgtggaatgtgcaagtggagatttggagcgctttgaggtctatggtagtaaagggaatagcttcatagaaaaactagacagatgcattctcaggaactttttggtgatgtttgtattcaactcccagagttgaactttcctttggaaagagcagctatgaaacactctttttctagaatctgcaagtggacgtttggagggctttgtggtttgtggtggaaaaggaaatatcttcacctaaatactagatagaagcattctcagaagcttctctgtgatgactgcattcaactcacggagttgaacactccttttgagagcgcagttttgaaactctctttctgtggcatctgcaaggggacatgtagacctctttgaagatttcgttggaaacggaatcatcttcacataaaaactatacagaagcagtctcagaatcttctttgtgatgtttgcattcaaatcccagagttgaactttcctttcaaagttcacgtttgaaacactctttttgcaggatctacaagtggatatttggaccactctgtgtccttcgttcgaaacgggtatatcttcacacgacatctagacagaagctttctcagaaaattctttgggatgattgagtggaactcacagagctgaacattccttgcgatgtagcagtttagaaacacactttctgcagaatctgcaagtgcatatttggacctctctgaggaattcgttggaaacgggataatttcagctgactaaacagaagcattctcagaaccttcttcgtgatgtctgcattcaactcacagtgtggaacctttctttgatagttcaggtttgaaacactctttttgtagaaactgcaaggggataattgcacttctttgaggcctaccgtagtaaaggaaataacttcctatagaaagaagacagaagatttctcagaaccctcttcgtgatgtttgcattcaactcacagtgctgaacctttctttgatagttcagctttgaaacactcttcttgtagaaactgcaagtggatatttggtcctctctgaggatttcgttggaaacgggataaaccgcacagaactaaacagaagatttctcagagccctcttcgtgatgtttgcattcaactcacagtgctgaacctttctttgatagtgcagctttaaaacactctttttgtagaaactgcaagtggatatttggtcctctctgaggatttcgttggaaacggaataaaccgcacagaacaaaaacagaagcattctcagaactttcttcgtgatgtttgcattcaactcacagtgttgaacctttctttgatagttcaggtttgaaacggtctttctgtagaaactgcaagtagatatttggacctctctgaggatttcgttggaaacgggataaaccgcacagaactaaaacagaagcattcacagaaaactcttggtgacgactgagtttaactcacagagctgaacattcctttggatggagcagtttcgaaacacactatttgtagaatgtgcaagtggatatttgggcctctctgaggatttcgttggaaacgggataaaccgcacagaactaaacagaagcattctcagaaactactttgtgatgattgcattcaagtcacagagttgaacattccctttgacagagcagtgtggaaactctctttgtgtagaatctgcaagtggagatatggaccgctttgaggcctatggtagtaaaggaaatagcttcatataaaagctagacagtagcattctcagaaacttctttgtgatgcttgcattcaactcacagagttgaactttcctttcgagagagaagctttgaaacactctttctccagaatgtgcaagtggagatttgcagggctttgaggcctgtggtggaaaaggaattatcttcccgtaaaagctagatggaagcattgtcagaaacttctttgtgatgattgcattcaactcacagagttgaaggttccttttcaaacagcagtttccaatcactctttctgtggaatctgcaagtggatatttggaactattttgaagatttcgttggaaacgggataatcttcacagaaaagctaaacagaagcattctcagaaacttctctgtgatgtttgtgttcaactcccagagtttcacgttgcttttcatagagtagttctgaaacatgcttttcgtagtgtctgcaagtggacatttggagcgctttcaggcctgtggtggaaaacgaattatggtcacataaaaatggagagaagccttctcagaaacttctctgtgatgattgcattcaactcacagagttgaaccctcctatggatagagcagtgttgaaactctctttttgtggaatctgcaagtggatatgtggacctctccgaagatgtctttggaaacgggaatatcttcacataaaaactaaacagaagcattctcagaaacttcttggtgatgtttgcattcaaatcccagagttgaaccttcctttgatagttcaggtttgaaacactctttctgtaggatctgcaagtggctatttggaccactctgtggccttcgttcgaaacgggtatatcttcgcataaaatctagacagaagcattctcagaaaatactttgtgatgattgagtttaaatcacagagctgaccattcctttggatggagcaggtttgagacacactttttgtagaatctacaagtggatatttggacctctctgaggatttcgttggaaacgggataactgcacctaactaaacggaagcattctcagaaactgctttgtgatgattgcattcacctcacagagttgaacattcctattgatagagcagtttggaaacactcttgttgtggaatgtgcaagtggagatttggagcgctttgaggcctatggtagtaaagggaatagcttcatagaaaaactagacagatgcattctcaggaactttttggtgatgtttgtattcaactcccagagttgaactttcctttggaaagagcagctatgaaacactctttttctagaatctgcaagtggacgtttggagggctttgtggtttgtggtggaaaaggaaatatcttcacctaaatactagatagaagcattctcagaagcttctctgtgatgactgcattcaactcacggagttgaacactccttttgagagcgcagttttgaaactctctttctgtggcatctgcaaggggacatgtagacctctttgaagatttcgttggaaacggaatcatcttcacataaaaactatacagaagcagtctcagaatcttctttgtgatgtttgcattcaaatcccagacttgaactttcctttcaaagttcacgtttgaaacactctttttgcaggatctacaagtggatatttggaccactctgtgtccttcgttcgaaacgggtatatcttcacacgacatctagacagaagctttctcagaaaattctttgggatgattgagttgaactcacagagctgaacattccctgcgatgtagcagtttagaaacacactttctgcagaatctgcaagtgtatatttggacctctctgaggaattcgttggaaacgggataatttcagctgactaaaccgaagcattctcagaaccttcttcgtgatgtctgcattcaactcacagtgtggaacctttctttgatagttcaggtttgaaacactctttttgtagaaactgcaaggggataattgcactcctttgaggagtaccgtagtaaaggaaataacttcctataaaaagaagacagaagcattctcagaaccctcttcgtgatgtttgcattcaactcacagtgctgaacctttctttgatagttcagctttgaaacactctttttgtagaaactgcaagtggatatttggtcctctctgaggatttcgttggaaacgggataaactgcacagaactaaacagaagcattctcagaaccttcttcgtgatgtttgcattcaactcacagtgttgaagctttctttgatagttcaggtttgaaacggtctttctgtagaaactgcaagtagatatttggacctctctgaggatttcgttggaaacgggataacccgcacagaactaaaacagaagcattcacagaaaactcttggtgacgactgagtttaactcacagagctgaagattcctttgaatggagcagtttcgaaacacactatttgtagaatctgcaagtggatatttgggcctctctgaggatttcgttgcaaacgggataaaccgcactgaactaaacagaagcattctcagaaactactttgtgatgattgcattcaagtcacagagttgaacattcccttcgacagagcagtttggaaactctctttgtgtataatctgcaagtggagatatggaccgctttgaggcctatggtagtaaaggaaatagcttcatataaaagctagacagtagcattctcagaaacttctttgtgatgcttgcattcaactcacagagttgaactttcctttcgagagagaagctttgaaacactctttttccagaatctgcaagtggacatttggagggctttgaggcctgtggtggaaaaggaattaacttcccgtaaaagctagatagaagcattgtcagaaacttctttgtgacgattgcattcaactcacagagatgaaggttcctttacaaacagcagtttccaaacactctttctgtggaatctgcaagtggatatttggacctctttgaagatttcgttggaaacgggagaatcttcacagaaaagctaaacagaagcattctcagaaacttctctgtgatgtttgtgttcaactcccagagtttcacattgcttttcatagagtagttctgaaacatgcttttcgtagtgtctgcaagtggacatttggagcgctttcaggcctgtggtggaaaaccaattatggtcccataaaaactggagagaagccttctcagaaacttctctgtgatgattgcattcaactcacagatttgaaccctcctatggatagagcattgttgaaactctctttttgtggaatctgcaagtggatatgtggacctctccgaagatgtctttggaaacgggaatgtcttcacataaaaactaaacagaagcattctcagaaacttctttgtgatgtttgcattcaaatcccagagttgaaccttcctgtgatagttcaggtttgaatcactctttttgtaggatctgcaagtggatatttggaccactctgtggccttcgttcgaaacgggtacatcttcacataaaatctagacagaagcattctcagaaaatactttgtgatgattgagtttaactcacagagctgaacattcctttggatggagcaggtttgagacacactttttgtagaatctacaagtggatatttggacctctctgaggatttcgttggaaacgcgataactgcacctaactaaacggaagcattctcagaaactgctttgtgatgattgcattcacctcacagagttgaacattcctattgatagagcagtttggaaacactcttgttgtggaatgtgcaagtggagatttggagcgctttgaggcctatggtagtaaagggaatagcttcatagaaaaactagacagatgcattctcaggaactttttggtgatgtttgtattcaactcccagagttgaactttcctttggaaagagcagctatgaaacactctttttctagaatctgcaagtggacgtttggagggctttgtggtttgtggtggaaaaggaaatatcttcacctaaatactagatagaagcattctcagaagcttctctgtgatgactgcattcaactcacggagttgaacactccttttgagagcgcagttttgaaactctctttctgtggcatctgcaaggggacatgtagacctctttgaagatttcgttggaaacggaatcatcttcacataaaaactatacagaagcagtctcagaatcttctttgtgatgtttgcattcaaatcccagagttgaactttcctttcaaagttcacgtttgaaacactctttttgcaggatctacaagtggatatttggaccactctgtgtccttcgttcgaaacgggtataacttcacacgacatctagacagaagctttctcagaaaattctttgcgatgattgagttgaactcacagagctgaacattccttgcgatgtagcagtttagaaacacactttctgcagaatctgcaagtgcatatttggacctctctgaggaattcgttggaaacgggataatttcagctgactaaacagaagcattctcagaaccttcttcgtgatgtctgcattcaactcacagtgtggaacctttctttgatagttcaggtttgaaacactctttttgtagaaactgtaaggggataattgcacttctttgaggcctaccgtagtaaaggaaataacttcctataaaaagaagacagaagcattctcagaaccctcttcgtgatgtttgcattcaactcacagtgctgaacctttctttgatagttcagctttgaaacactctttttgtagaaactgcaagtggatatttggtcctctctgaggatttcgttggaaacgggataaaccgcacagaactaaacagaagcattcacagaaaactcttggtgacgactgagtttaaatcacagagctgaacattcctttggatggagcagtttcgaaacacactctttgtagaatgtgcaagtggatatttgggcctctctgaggatttcgttggaaacgggataaaccgcacagaactaaaacagaagcattcacagaaaactcttggtgacgactgagtttaactcacagagctgaacattcctttggatggagcagtttcgaaacacactatttgtagaatgtgcaagtggatatttaggcctctctgaggatttcgttggaaacgggataaaccgcacagaactaaacagaagcattctcagaaactactttgtgatgattgcattcaagtcacagagttgaacattccctttgacagagcagtttggaaactctctttgtgtagaatctgcaagtggagatatggaccgctttgaggcctatggtagtaaaggaaatagcttcatataaaagctagacagtagcattctcagaaacttctttgtgatgcttgcattcaactcacagagttgaactttcctttcgagagagaagctttgaaacactctttttccagaatctgcaagtggacatttggagggctttgaggcctgtggtggaaaaggaattatcttcccgtaaaagctagatagaaagcattgtcagaaacttctttgtgatgattgcattcaagtcacagagttgaaggttccttttcaaagagcagtttccaatcactctttctgtggaatctgcaagtggatatttggacctctttgaagatttcgttggaaacgggagaatcttcacagaaaagctaaacagaagcattctcagaaacttctctgtgatgtttgtgttcaactccaagagtttcacattgcttctcatagagtagttctgaaacatgcttttcgtagtgtctgcaagtggacatttggagcgctttcaggcctgtggtggaaaacgaattatggtcacataaaaactgaagagataagccttctcagaaacttctctgtgatgattgcattcaactcacagagttgaaccctcctatggatagagcagtgttgaaactctctttttgtggaatctgcaagcggatatgtggacctctccgaagatgtctttggaaacgggaatatcttcacataaaaactaaacagaagcattctcagaaacttcttggtgatgtttgcattcaaatcccagagttgaaccttcctttgatagttcaggtttgaaacactctttctgtaggatctgcaagtggctatttggaccactctgtggccttcgttcgaaacgggtatatcttcgcataaaatctagacagaagcattctcagaaaatactttgtgatgattgagtttaaatcacagagctgaccattcctttggatggagcaggtttgagacacactttttgtagaatctacaagtggatatttggacctctctgaggatttcgttggaaacgggataactgcacctaactaaacggaagcattctcagaaactgctttgtgatgattgcattcacctcacagagttgaccattcccattgatagagcagtttggaaacactcttgttgtggaatgtgcaagtggagatttggagcgctttgaggcctatggtagtaaagggaatagcttcatagaaaaactagacagatgcattctcaggaactttttggtgatgtttgtattcaactcccagagttgaactttcctttggaaagagcagctatgaaacactctttttctagaatctgcaagtggacgattggagggctttgtggtttttggtggaaaaggaaatatcttcacctaaatagtagatagaagcattctcagaagcttctctgtgatgactgcattcaactcacggagttgaacactccttttgagagcgcagttttgaaactctctttctgtggcatctgcaaggggacatgtagacctctttgaagatttcgttggaaacggaatcatcctcacatcaaaactatacagaagcagtctcagaatcttctttgtgatgtttgcattcaaatcccagagttgaactttcctttcaaagttcacgtttgaaacactctttttgcaggatctacaagtggatatttggaccactctgtgtccttcgttcgaaacgggtatatcttcacatgacatctagacagaagctttctcagaaaattctttgggatgattgagttgaactcacagagctgaacattccttgcgatggagcagtttagaaacacactttctgcagaatctgcaagtgcatatttggacctctctgaggaattcgttgcaaacgggataatttcagctgactaaacagaagcattctcagaaccttcttcgtgatgtctgcattcaactcacagtgtggaacctttctttgatagttcaggtttgaaacactctttttgtagagactgcaaggggataattgcacttctttgaggcctaccgtagtaaaggaaataacttcctataaaaagaagacagaagcattctcagaaccctcttcgtgatgtttgcattcaactcacagtgctgaacctttctttgatagttcagctttgaaacactctttttgtagaaactgcaagtggatatttggtcctctctgaggatttcgttggaaacgggataaactgcacagaactaaacagaagcattctcagaaccttcttcgtgatgtttgcattcaactcacagtgttgaacctttctttgatagttcaggtttgaaacggtctttctgtagaaactgcaagtagatatttggacctctctgaggatttcgttggaaacgggataacccgcacagaactaaaacagaagcattcacagaaaactcttggtgacgactgagtttaactcacagagctgaacattcctttggatggagcagtttcgaaacacactatttgtagaatgtgcaagtggatatttgggcctctctgaggatttcgttggaaacgggataaaccgcacagaactaaacagaagcattctcagaaactactttgtgatgattgcattcaagtcacagagttgaacattccctttgacagagcagtttggaaactctctttgtgtagaatctgcaagtggagatatggaccgctttgaggcctatggtagtaaaggaaatagcttcatatgaaagctagacagtagcattctcagaaacttctttgtgatgcttgcattcaactcacagagttgaactttcctttcgagagagaagctttgaaacactctttttccagaatctgcaagtggacatttggagggctttgaggcctgtggtggaaaaggaattaacttcccgtaaaagctagatagaagcattgtcagaaacttctttgtgatgattgcattcaactcacagagatgaaggttcctttacaaacagcagtttccaaacactctttctgtggaatctgcaagtggatatttggacctctttgaagatttcgttggaaacgggagaatcttcacagaaaagctaaacagaagcattctcagaaacttctctgtgatgtttgtgttcaactcccagagtttcacattgcttttcatagagtagttctgaaacatgcttttcgtagtgtctgcaagtggacatttggagcgctttcaggcctgtggtggaaaacgaattatggtcccataaaaactggagagaagccttctcagaaacttctctgtgatgattgcattcaactcacagatttgaaccctcctatggatagagcattgttgaaactctctttttgtggaatctgcaagtggatatgtggagctctccgaagatgtctttggaaacgggaatatcttcacataaaaactaaacagaagcattctcagaaacttcttggtgatgtttgcattcaaatcccagagttgaaccttcctgtgatagttcaggtttgaaacactctttttgtaggatctgcaagtggatatttggaccactctgtggccttcgttcgaaacgggtacatcttcacataaaatctagacagaagcattctcagaaaatactttgtgatgattgagtttaactcacagagctgaacattcctttggatggagcaggtttgagacacactttttgtagaatctacaagtggatatttggacctctctgaggatttcgttggaaacgcgataactgcacctaactaaacggaagcattctcagaaactgctttgtgatgattgcattcacctcacagagttgaacattcctattgatagagcagtttggaaacactcttgttgtggaatgtgcaagtggagatttggagcgctttgaggcctatggtagtaaagggaatagcttcatagaaaaactagacagatgcattctcaggaactttttggtgatgtttgtattcaactcccagtgttgaactttcctttggaaagagcagctatgaaacactctttttctagaatctggaagtggacgtttggagggctttgtggtttgtggtggaaaaggaaatatcgtcacctaaatactagatagaagcattctcagaagcttctctgtgatgactgcattcaactcacggagttgaacactccttttgagagcgcagttttgaaactctctttctgtggcatctgcaaggggacatgtagacctctttgaagatttcgttggaaacggaatcatcttcacataaaaactatacagaagcagtctcagaatcttctttgtgatgtttgcattcaaatcccagagttgaactttcctttcaaagttcacgtttgaaacactctttttgcaggatctacaagtggatatttggaccactctgtgtccttcgttcgaaacgggtatatcttcacacgacatctagacagaagctttctcagaaaattctttgggatgattgagtggaactcacagagctgaacattccttgcgatgtagcagtttagaaacacactttctgcagaatctgcaagtgcatatttggacctctctgaggaattcgttggaaacgggataatttcagctgactaaacagaagcattctcagaaccttcttcgtgatgtctgcattcaactcacagtgtggaacctttctttgatagttcaggtttgaaacactctttttgtagaaactgcaaggggataattgcacttctttgaggcctaccgtagtaaaggaaataacttcctatagaaagaagacagaagcattctcagaaccctcttcgtgatgtttgcattcaactcacagtgctgaacctttctttgatagttcagctttgaaacactcttcttgtagaaactgcaagtggatatttggtcctctctgaggatttcgttggaaacgggataaaccgcacagaactaaacagaagaattctcagagccctcttcgtgatgtttgcattcaactcacagtgctgaacctttctttgatagtgcagctttgaaacactctttttgtagaaactgcaagtggatgtttggtcctctctgaggatttcgttggaaacgggataaaccgcacagaactaaaacagaagcattgtcagaaacttctttgtgatgattgcattcaactcacagagttgaaggttccttttcaaacagcagtttccaatcactctttctgtggaatctgcaagtggatatttgggcctctctgaggatttcgttggaaacgggataaaacgcacagaactaaaacagaagcattctcagaaacttctctgtgatgtttgtgttcaactcccagagtttcacgttgcttttcatagagtagttctgaaacatgcttttcgtagtgtctgcaagtggacatttggagcgctttcaggcctgtggtggaaaacgaattatggtcacataaaaactggagagaagccttctcagaaacttctctgtgatgattgcattcaactcacagagttgaaccctcctatggatagagcagtgttgaaactctctttttgtggaatctgcaagtggatatgtggacctctccgaagatgtctttggaaacgggaatatcttcacataaaaactaaacagaagcattctcagaaacttcttggtgatgtttgcattcaaatcccagagttgaaccttcctttgatagttcaggtttgaaacactctttctgtaggatctgcaagtggctatttggaccactctgtggccttcgttcgaaacgggtatatcttcgcataaaatctagacagaagcattctcagaaaatactttgtgatgattgagtttaaatcacagagctgaccattcctttggatggagcaggtttgagacacactttttgtagaatctacaagtggatatttggacctctctgaggatttcgttggaaacgggataactgcacctaactaaacggaagcattctcagaaactgctttgtgatgattgcattcacctcacagagttgaacattcctattgatagagcagtttggaaacactcttgttgtggaatgtgcaagtggagatttggagcgctttgaggcctatggtagtaaagggaatagcttcatagaaaaactagacagatgcattctcaggaactttttggtgatgtttgtattcaactcccagagttgaactttcctttggaaagagcagctatgaaacactctttttctagaatctgcaagtggacgtttggagggctttgtggtttgtggtggaaaaggaaatatcttcacctaaatactagatagaagcattctcagaagcttctctgtgatgactgcattcaactcacggagttgaacactccttttgggagcgcagttttgaaactctctttctgtggcatccgcaaggggacatgtggacctctttgaagatttcgttggaaacggaatcatcttcacataaaaactatacagaagcagtctcagaatcttctttgtgatgtttgcattcaaatcccagagttgaactttcctttcaaagttcacgtttgaaacactctttttgcaggatctacaagtggatatttggaccactctgtgtccttcgttcgaaacgggtatatcttcacatgacatctagacagaagctttctcagaaaattctttgggatgattgagtggaactcacagagctgaacattccttgcgatgtagcagtttagaaacacactttctgcagaatctgcaagtgcatatttggacctctctgaggaattcgttggaaacgggataatttcagctgactaaacagaagcattctcagaaccttcttcgtgatgtctgcattcaactcacagtgtggaacctttctttgatagttcaggtttgaaacactctttttgtagaaactgcaaggggataattgcacttctttgaggcctacccgtagtaaaggaaataacttcctatagaaagaagacagaagcattctcagaaccctcttcgtgatgtttgcattcaactcacagtgctgaacctttctttgatagttcagctttgaaacactcttcttgtagaaactgcaagtggatatttggtcctctctgaggatttcgttggaaacgggataaaccgcacagaactaaacagaagaactctcagagccctcttcgtgatgtttgcattcaactcacagtgctgaacctttctttgatagtgcagctttgaaacactctttttgtagaaactgcaagtggatatttggtcctctctgaggatttcgttggaaacgggataaaccgcacagaactaaaacagaaacattcacagaaaactcttggtgacgactgagtttaactcacagagctgaacattcctttggatggagcagtttcgaaacacactatttgtagaatctgcaagtggatatttgggcctctctgaggatttcgttggaaacgggataaaacgcacagaactaaaacagaagcattctcagaaactactttgtgatgattgcattcaagtcacagagttgaacattccctttgacagagcagtttggaaactctctttgtgtagaatctgcaagtggagatatggaccgctttgaggcctatggtagtaaaggaaatagcttcatataaaagctagacagtagcattctcagaaacttctttgtgatgcttgcattcaactcacagagttgaactttcctttcgagagagaagctttgaaacactctttttccagaatgtgcaagtggacatttggggagctttgaggcctggggtggaaaaggaattatcttcccgtaaaagctagatagaagcattgtcagaaacttctttgtgatgattgcattcaactcacagagttgaaggttccttttcaaacagcagtttccaatcactctttctgtggaatctgcaagtggatatttcgacctctttgaagatttcgttggaaacgggagaatcttcacagaaaagctaaacagaagcattctcagaaacttctctgtgatgtttgtgttcaactcccagagtttcacgttgcttttcatacagtagttctgaaacatgcttttcgtagtgtctacaagtggacatttggagcgctttcaggcctgtggtggaaaacgaattatggtcacataaaaactggagagaagccttctcagaaacttttctgtgatgattgcattcaactcacagagttgaaccctcctatggacagagcagtgttgaaactctctttttgtggaatctgcaagtggatatgtggacctctccgaagatgtctttggaaacgggaatatcttcacataaaaactaaacagaagcattctcagaaacttcttggtgatgtttgcattcaaatcccagagttgaaccttcctttgatagttcaggtttgaaacactctttttgtaggatctgcaagtggctatttggaccactctgtggccttcgttcgaaacgggtatatcttcgcataaaatctagacagaagcattctcagaaaatactttgtgatgattgagtttaaatcacagagctgaccattcctttggatggagcaggtttgagacacactttttgtagaatctacaagtggatatttggacctctctgaggatttcgttggaaacgggataactgcacctaactaaacggaagcattctcagaaactgctttgtgatgattgcattcacctcacagagttgaacattcctattgatagagcagtttggaaacactcttgttgtggaatgtgcaagtggagatttggagcgctttgaggcctatggtagtaaagggaatagcttcatagaaaaactagacagatgcattctcaggaactttttggtgatgtttgtattcaactcccagagttgaactttcctttggaaagagcagctatgaaacactctttttctagaatctgcaagtggacgtttggagggctttgtggtttgtggtggaaaaggaaatatcttcacctaaatactagatagaagcattctcagaagcttctctgtgatgactgcattcaactcacggagttgaacactccttttgagagcgcacttttgaaactctctttctgtggcatctgcaaggggacatgtagacctctttgaagatttcgttggaaacggaatcatcttcacataaaaactatacagaagcagtctcagaatcttctttgtgatgtttgcattcaaatcccagagttgaactttcctttcaaagttcacgtttgaaacactctttttgcaggatctacaagtggatatttggaccactctgtgtccttcgttcgaaacgggtatatcttcacacgacatctagacagaagctttctcagaaaattctttgggatgattgagtggaactcacagagctgaacattccttgcgatgtagcagtttagaaacacactttctgcagaatctgcaagtgcatatttggacctctctgaggaattcgttggaaacgggataatttcagctgactaaacagaagcattctcagaaccttcttcgtgatgtctgcattcaactcacagtgtggaacctttctttgatagttcaggtttgaaacactctttttgtagaaactgcaaggggataattgcacttctttgaggcctaccgtagtaaaggaaataacttcctatagaaagaagacagaagcattctcagaaccctcttcgtgatgtttgcattcaactcacagtgctgaacctttctttgatagttcagctttgaaacactcttcttgtagaaactgcaagtggatatttggtcctctctgaggatttcgttggaaacgggataaaccgcacagaactaaacagaagcattctcagaaccttcttcgtgatgtttgcattcaactcacagtgttgaacctttctttcatagttcaggtttgaaacggtctttctgtagaaactgcaagtagatatttggacctctctgaggatttcgttggaaacgggataaacagcacagaactaaaacagaagcattcacagaaaactcttggtgacgactgagtttaactcacagagctgaacattcctttggatggagcagtttcgaaacacactatttgtagaatctgcaagtggatatgtgggcctctctgaggatttcgttcgaaacgggataaaccgcaaagaactaaaacagaagcattctcagaaactactttgtgatgattgcattcaagtcacagagctgaacattccctttgacagagaagtttggaaactctctttgtgtagaatctgcaagtggagatatggaatgctttgaggactatggtagtaaaggaaatagcttcatataaaagctagacagtagcattctcagaaacttctttgtgatgcttgcatttaactcacagagttgaactttcctttcgagagagaagctttgaaacactctttttccagaatctgcaagaggacatttggagggctttgaggcctgtagtggaaaaggaattatcttcccgtaaaagctagatagaagcattgtcagaaacttctttgtgatgattgcattcaactcacagagaatgaaggttcctttacaaacagcagtttccaaacactctttctgtggaatctgcaagtggatatttggacctctttgaagatttcgttggaaacgggagaatcttcacagaaaagctaaacagaagcattctcagaaacttctctgtgatgtttgtgttcaactcccagagtttcacattgcttttcatagagtagttctgaaacatgcttttcgtagtatctgcaagtggacatttggagcgctttcaggcctgtggtggaaaacgaattatggtcccataaaaactggagagaagccttctcagaatcttctctgtgatgattgcattcaactcacagagttgaaccctcctatggatagagcagtgttgaaactctctttttgtggaatctgcaagtggatatgtggacctctccgaagatgtctttggaaacgggaatatcttcacataaaaactaaacagaagcattctcagaaacttcttggtgatgtttgcattcaaatcccagacttgaaccttcctttgatagttcaggtttgaaacactctttttgtaggatctgcaagtggctatttggaccactctgtggccttcgttcgaaacgggtatatcttcgcataaaatctagacagaagcattctcagaaaatactttgtgatgattgagtttaaatcacagagctgaccattcctttggatggagcaggtttgagacacactttttgtagaatctacaagtggatatttggacctctctgaggatttcgttggaaacgggataactgcacctaactaaacggaagcattctcagaaactgctttgtgatgattgcattcacctcacagagttgaacattcctattgatagagcagtttggaaacactcttgttgcggaatgtgcaagtggagatttggagcgctttgaggcctgtggtagtaaagggaatagcttcatagaaaaactagacagatgcattctcaggaactttttggtgatgtttgtattcaactcccagagttgaactttcctttggaaagagcagctatgaaacactctttttctagaatctgcaagtggacgtttggagggctttgtggtttgtggtggaaaaggaaatatcttcacctaaatactagatagaagcattctcagaagcttctctgtgatgactgcattcaactcacggagttgaacactccttttgagagcgcagttttgaaactctctttctgtggcatctgcaaggggacatgtagacctctttgaagatttcgttggaaacggaatcatcttcacataaaaactatacagaagcagtctcagaatcttctttgtgttgtttgcattcaaatcccagagttgaactttcctttcaaagttcacgtttgaaacactctttttgcaggatctacaagtggatatttggaccactctgtgtccttcgtttgagacgggtatatcttcacatgacatctagacagaagctttctcagaaaattctttgggatgattgagtggaactcacagagctgaacattccttgcgatgtagcagtttagaaacacactttctgcagaatctgcaagtgcatatttggacctctctgaggaattcgttggaaacgggataattcagctgactaaacagaagcattctcagaaccttcttcgtgatgtctgcattcaactcacagtgtggaacctttctttgatagttcaggtttgaaacactctttttgtagaaactgcaaggggataattgcacttctttgaggcctaccgtagtaaaggaaataacttcctatagaaagaagacagaagcattctcagaaccctcttcgtgatgtttgcattcaactcacagtgctgaacctttctttgatagttcagctttgaaacactcttcttgtagaaactgcaagtggatatttggtcctctctgaggatttcgttggaaacgggataaaccgcacagaactaaacagaagcattctcagaacttcttcgtgatgtttgcattcaactcacagtgttgaacctttctttgatagttcaggtttgaaacggtctttctgtagaaactgcaagtagatatttggacctctctgaggatttcgttggaaacgggataaaccgcacagaactaaaacagaagcattcacagaaaactcttggtgacgactgagtttaactcacagagctgaacattcctttggatggagcagtttcgaaacacactatttgtagaatgtgcaagtggatatttgggcctctctgaggatttcgttggaaacgggataaaccgcacagaactaaacagaagcattctcagaaactactttgtgacgattgcattcaagtcacagagttgaacattccctttgacagagcagtttggaaactctctttgtgtagaatctgcaagtggagatatggaccgctttgaggcctatggtagtaaaggtaatagcttcatatgaaagctagacagtagcattctcagaaacttctttgtgatgcttgcattcaactcacagagttgaactttcctttcgagagagaagctttgaaacactctttttccagaatctgcaagtggacatttggagggctttgaggcctgtggtggaaaaggaattaacttcccgtaaaagctagatagaagcattgtcagaaacttctttgtgatgattgcattcaactcacagagatgaaggtttctttacaaacagcagtttccaaacactctttctgtggaatctgcaagtggatatttggacctctttgaagatttcgttggaaacgggagaatcttcacagaaaagctaaacagaagcattctcagaaacttctctgtgatgtttgtgttcaactcccagagtttcacattgcttttcatagagtagttctgaaacatgcttttcgtagtgtctgcaagtggacatttggagtgctttcaggcctgtggtggaaaacgaattatggtcccataaaaactggagagaagccttctcagaaacttctctgtgatgattgcattcaactcacagatttgaaccctcctatggatagagcattgttgaaactctctttttgtggaatctgcaagtggatatgtggacctctccgaagatgtctttggaaacgggcatatcttcacataaaaactaaacagaagcattctcagaaacttcttcgtgatgtttgcattcaaatcccagagttgaaccttcctttgagagttcaggtttgaaacactctttttgtaggatctgcaagtggatatttggaccactctgtggccttcgttcgaaacgggtacatcttcgcataaaatctagacagaagcattctcagaaaatactttttgatgactgagttgaactcacagagctgaacattcctttggatggagcaggtttgagacacactttttgtagaatctacaagtggatatttggacctctctgaggatttcgttggaaacgggataactgcacctaactaaacggaagcattctcagaaactgctttgtgatgattgcattcacctcacagagttgaacattcctattgatagagcagtttggaaacactcttcttgtggaatgtgcaagtggagatttggagcgctttgaggcctatggtagtaaagggaatagcttcatagaaaaactagacagatgcattctcaggaactttttggtgatgtttgtattcaactcccagagttgaactttcctttggaaagagcagctatgaaacactctttttctaaaatctgcaagtggacgtttggagggctttgtggtttgtggtggaaaaggaaatatcttcacctaaatactagatagaagcatcctcagaagcttctctgtgatgactgcattcaactcacggagttgaacactccttttgagagcgcagttttgaaactctctttctgtggcatctgcaaggggacatgtagacctctttgaagatttcgttggaaacggaatcatcttcacataaaaactatacagaagcagtctcagaatcttctttgtgatgtttgcattcaaatcccagagttgaactttcctttcaaagttcacgtttgaaacactctttttgcaggatctacaagtggatatttggaccactctgtgtccttcgttcgaaacgggtatatcttcacaagacatctagacagaagctttctcagaaaattctttgggatgattgagtggaactcacagagctgaacattccttgcgatgtagcagtttagaaacacactttctgcagaatctgcaagtgcatatttgaacctctctgaggaattcgttggaaacgggataatttcagctgactaaacagaagcattctcagaaccttcttcgtgatgtctgcattcaactcacagtgtggaacctttctttgatagttcaggtttgaaacattctttttgtagaaactgcaaggggataattgcacttctttgaggcctaccgtcgtaaaggaaataacttcctatagaaagaagacagaagcattctcagaaccctcttcgtgatgtttgcattcaactcacagtgctgaacctttctttgatagttcagctttgaaacactctttttgtagaaactgcaaatggatatttggtcctctctgaggatttcgttggaaaagggataaaacgcacagaactaaacagaagcattcacagaaaactcctggtgacgactgagtttaactcacagagctgaacattcctttggatggagcagtttcaaaacacactatttgtagaatgtgcaagtggatatgtgggcctctctgaggatttcgttggaaacgggataaaccgcacagaactaaaacagaagcattctcagaaactactttgtgatgattgcattcaagtcacagagttgaacattccctttgacagagcagtttggaaactctctttgtgtagaatctgcaagtggagatatggaccgctttgaggcctatggtagtaaaggaaatagcttcatataaaagctagacagtagcattctcagaaacttctttgtgatgcttgcattcaactcacagagttgaactttcctttcgagagagaagctttgaaacactgtttttccagaatctgcaagtggacatttggagggctttgaggcctgtggtggaaaaggaattaacttcccataaaagctagatagaagcattgtcagaaacttctttgtgatgattgcattcaactcacagagttgaaggttccttttcaaacagcagtttccaatcactctttctgtggaatctgcaagtggatatttgggcctctctgaggatttcgttggaaacgggataaaacgcacagaactaaaacagaagcattctcagaaacttctctgtgatgtttgtgttcaactcccagagtttcacgttgcttttcatagagtagttctgaaacatgcttttcgtagtgtctgcaagtggacatttggagcgctttcaggccggtggtggaaaacgaattatggtcacataaaaactggagagaagccttctcagaaacttctctgtgatgattgcattcaactcacagagttgaaccctcctatggatagagcagtgttgaaactctctttttgtggaatctgcaagtggatatgtggacctctccgaagatgtctttggaaacgggaatatcttcacataaaaactaaacagaagcattctcagaaacttcttggtgatgtttgcattcaaatcccagagttgaaccttcctttgatagttcaggtttgaaacactctttctgtaggatctgcaagtggctatttggaccactctgtggccttcgttcgaaacgggtatatcttcgcataaaatctagacagaagcattctcagaaaatactttgtgatgattgagtttaactcacagagctgaacattcctttggatggagcaggtttgagacacactttttgtagaatctacaagtggatatttggatctttctgaggatttcgttggaaacgggataactgcacctaactaaacggaaagcattctcagaaactgctttgtgatgattgcattcacctcacaggagttgaacattcctattgatagagcagtttggaaacactcttgttgtggaatgtgcaagtggagatttggagcgctttgaggcctgtggtagtaaagggaatagcttcatagaaaaactagacagatgcattctcaggaactttttggtgatgtttgtattcaactcccagagttgaactttcctttggaaagagcagctatgaaacactctttttctagaatctgcaagtggacgtttggagggctttgtggtttgtggtggaaaaggaaatatcttcacctaaatactagatagaagcattctcagaagcttctctgtgatgactgcattcaactcacggagttgaacactccttttgagagcgcagttttgaaactctctttctgtggcatctgcaaggggacatgtagacctctttgaagatttcgttggaaacggaatcatcttcacataaaaactatacagaagcagtctcagaatcttctttgtgatgtttgcattcaaatcccagagttgaactttcctttcaaagttcacgtttgaaacactctttttgcaggatctacaagtggatatttggaccactctgtgtccttcgttcgaaacgggtatatcttcacacgacatctagacagaagctttctcagaaaattctttgggatgattgagtggaactcacagagctgaacattccttgcgatgtagcagtttagaaacacactttctgcagaatctgcaagtgcatatttggacctctctgaggaattcgttggaaacgggataatttcagctgactaaacagaagcattctcagaacttcttcgtgatgtctgcattcaactcacagtgtggaacctttctttgatagttcaggtttgaaacactctttttgtagaaactgcaaggggataattgcacttctttgaggcctaccgtagtaaaggaaataacttcctatagaaagaagacagaagcattctcagaaccctcttcgtgatgtttgcattcaactcacagtgctgaacctttctttgatagttcagctttgaaacactcttcttgtagaaactgcaagtggatatttggtcctctctgaggatttcgttggaaacgggataaaccgcacagaactaaacagaagaattctcagagccctcttcgtgatgtttgcattcaactcacagtgctgaacctttctttgatagtgcagctttgaaacactctttttgtagaaactgcaagtggatatttggtcctctctgaggatttcgttggaaacgggataaaccgcacagaactaaaacagaagcattcacagaaaactcttggtgacgactgagtttaactcacagagctgaacattcctttggatggagcagtttcgaaacacactatttgtagaatctgcaagtggatatttgggcctctctgaggatttcgttggaaacgggataaaacgcacagaactaaaacagaagcattctcagaaactactttgtgatgattgcattcaagtcacagagttgaacattccctttgacagagcagtttggaaactctctttgtgtagaatctgcaagtggagatatggaccgctttgaggcctatggtagtaaaggaaatagcttcatataaaagctagacagtagcattctcagaaacttctttgtgatgcttgcattcaactcacagagttgaactttcctttcgagagagaagctttgaaacactctttttccagaatgtgcaagtggacatttggggagctttgaggcctgtggtggaaaaggaattatcttcccgtaaaagctagatagaagcattgtcagaaacttctttgtgatgattgcattcaactcacagagttgaaggttccttttcaaacagcagtttccaatcactctttctgtggaatctgcaagtggatatttcgacctctttgaagatttcgttggaaacgggagaatcttcacagaaaagctaaacagaagcattctcagaaacttctctgtgatgtttgtgttcaactcccagagtttcacgttgcttttcatagagtagttctgaaacatgcttttcgtagtgtctgcaagtggacatttggagcgctttcaggcctgtggtggaaaacgaattatggtcacataaaaactggagagaagccttctcagaaacttctctgtgatgattgcattcaactcacagagttgaaccctcctatggatagagcagtgttgaaactctctttttgtggaatctgcaagtggatatgtggacctctccgaagatgtctttggaaacgggaatatcttcacataaaaactaaacagaagcattctcagaaacttcttggtgatgtttgcattcaaatcccagagttgaaccttcctttgatagttcaggtttgaaacactctttttgtaggatctgcaagtggctatttggaccactctgtggccttcattcgaaacgggtatatcttcgcataaaatctagacagaagcattctcagaaaatactttgtgatgattgagtttaaatcacagagctgaccattcctttggatggagcaggtttgagacacactttttgtagaatctacaagtggatatttggacctctctgaggatttcgttggaaacgggataactgcacctaactaaacggaagcattctcagaaactgctttgtgatgattgcattcacctcacagagttgaacattcctattgatagagcagtttggaaacactcttgttgtggaatgtgcaagtggagatttggagcgctttgaggtctatggtagtaaagggaatagcttcatagaaaaactagacagatgcattctcaggaactttttggtgatgtttgtattcaactcccagagttgaactttcctttggaaagagcagctatgaaacactctttttctagaatctgcaagtggacgtttggagggctttgtggtttgtggtggaaaaggaaatatcttcacctaaatactagatagaagcattctcagaagcttctctgtgatgactgcattcaactcacggagttgaacactccttttgagagcgcagttttgaaactctctttctgtggcatctgcaaggggacatgtagacctctttgaagatttcgttggaaacggaatcatcttcacataaaaactatacagaagcagtctcagaatcttctttgtgatgtttgcattcaaatcccagagttgaactttcctttcaaagttcacgtttgaaacactctttttgcaggatctacaagtggatatttggaccactctgtgtccttcgttcgaaacgggtatatcttcacacgacatctagacagaagctttctcagaaaattctttgggatgattgagtggaactcacagagctgaacattccttgcgatgtagcagtttagaaacacactttctgcagaatctgcaagtgcatatttggacctctctgaggaattcgttggaaacgggataatttcagctgactaaacagaagcattctcagaaccttcttcgtgatgtctgcattcaactcacagtgtggaacctttctttgatagttcaggtttgaaacactctttttgtagaaactgcaaggggataattgcacttctttgaggcctaccgtagtaaaggaaataacttcctatagaaagaagacagaagcattctcagaaccctcttcgtgatgtttgcattcaactcacagtgctgaacctttctttgatagttcagctttgaaacactcttcttgtagaaactgcaagtggatatttggtcctctctgaggatttcgttggaaacgggataaaccgcacagaactaaacagaagaattctcagagccctcttcgtgatgtttgcattcaactcacagtgctgaacctttctttgatagtgcagctttgaaacactctttttgtagaaactgcaagtggatgtttggtcctctctgaggatttcgttggaaacgggataaaccgcacagaactaaaacagaagcattgtcagaaacttctttgtgatgattgcattcaactcacagagttgaaggttccttttcaaacagcagtttccaatcactctttctgtggaatctgcaagtggatatttgggcctctctgaggatttcgttggaaacgggataaaacgcacagaactaaaacagaagcattctcagaaacttctctgtgatgtttgtgttcaactcccagagtttcacgttgcttttcatagagtagttctgaaacatgcttttcgtagtgtctgcaagtggacatttggagcgctttcaggcctgtggtggaaaacgaattatggtcacataaaaactgcagagaagccttctcagaaacttctctgtgatgattgcattcaactcacagagttgaaccgtcctatgcatagagcagtgttgaaactctctttttgtggaatctgcaagtggatatgtggacctctccgaagatgtctttggaaacgggaatatcttcacataaaaactaaacagaagcattctcagaaacttcttggtgatgtttgcattcaaatcccagagttgaaccttcctttgatagttcaggtttgaaacactctttctgtaggatctgcaagtggctatttggaccactctgtggccttcgttcgaaacgggtatatcttcgcataaaatctagacagaagcattctcagaaaatactttgtgatgattgagtttaaatcacagagctgaccattcctttggatggagcaggtttgagacacactttttgtagaatctacaagtggatatttggacctctctgaggatttcgttggaaacgggataactgcacctaactaaacggaagcattctcagaaactgctttgtgatgattgcattcacctcacagagttgaacattcctattgatagagcagtttggaaacactcttgttgtggaatgtgcaagtggagatttggagcgctttgaggcctatggtagtaaagggaatagcttcatagaaaaactagacagatgcattctcaggaactttttggtgatgtttgtattcaactcccagagttgaactttcctttggaaagagcagctatgaaacactctttttctagaatctgcaagtggacgtttggagggctttgtggtttgtggtggaaaaggaaatatcttcacctaaatactagatagaagcattctcagaagcttctctgtgatgactgcattcaactcacggagttgaacactccttttgagagcgcagttttgaaactctctttctgtggcatctgcaaggggacatgtagacctctttgaagatttcgttggaaacggaatcatcttcacataaaaactatacagaagcagtctcagaatcttctttgtgatgtttgcattcaaatcccagagttgaactttcctttcaaagttcacgtttgaaacactctttttgcaggatctacaagtggatatttggaccactctgtgtccttcgttcgaaacgggtatatcttcacatgacatctagacagaagctttctcagaaaattctttgggatgattgagtggaactcacagagctgaacattccttgcgatgtagcagtttagaaacacactttctgcagaatctgcaagtgcatatttggacctctccgaggaattcgttggaaacgggataatttcagctgactaaacagaagcattctcagaaccttcttcgtgatgtctgcattcaactcacagtgtggaacctttctttgatagttcaggtttgaaacactctttttgtagaaactgcaaggggataattgcacttctttgaggcctaccgtagtaaaggaaataacttcctatagaaagaagacagaagcattctcagaaccctcttcgtgatgtttgcattcaacacacagtgctgaacctttctttgatagttcagctttgaaacactcttcttgtagaaactgcaagtggatatttggtcctctctgaggatttcgttggaaacgggataaaccgcacagaactaaacagaagcattctcagaaccttcttcgtgatgtttgcattcaactcacagtgttgaacctttctttgatagttcaggtttgaaacggtctttctgtagaaactgcaagtagatatttggacctctctgaggatttcgttggaaacgggataacccgcacagaactaaaacagaagcattcacagaaaactcttggtgacgactgagtttaactcacagagctgaacattcctttggatggagcagtttcgaaacacactatttgtagaatgtgcaagtggatatttgggcctctctgaggatttcgttggaaacgggataaaccgcacagaactaaacagaagcattctcagaaactactttgtgatgattgcattcaagtcacagagttgaacattccctttgacagagcagtttggaaactctctttgtgtagaatctgcaagtggagatatggaccgctttgaggcctatggtagtaaaggaaatagcttcatataaaagctagacagtagcattctcagcaaacttctttgtgatgcttgcattcaactcacagagttgaactttcctttcgagagagaagctttgaaacactctttttccagaatctgcaagtggacatttggagggctttgaggcctgtggtggaaaaggaattatcttcccgtaaaagctagatagaagcattgtcagaaacttctttgtgatgattgcattcaactcacagagatgaaggttcctttacaaacagcagtttccaaacactctttctgtggaatctgcaagtggatatttggacctctttgaagatttcgttggaaacgggagaatcttcacagaaaagctaaacagaagcattctcagaaacttctctgtgatgtttgtgttcaactcccagagtttcacattgcttctcatagagtagttctgaaacatgcttttcgtagtgtctgcaagtggtcatttggagcgctttccggcctgtggtggaaaacgaattatggtcacataaaaactggagagaagccttctcagaaacttctctgtgatgattgcattcaactcacagagttgaaccctcctatggatagagcagtgttgaaactctctttttgtggaatctgcaagtggatatgtggacctctccgaagatgtctttggaaacgggaatatcttcacataaaaactaaacagaagcattctcagaaacttcttggtgatgtttgcattcaaatcccagagttgaaccttcctttgatagttcaggtttgaaacactctttctgtaggatctgcaagtggctatttggaccactctgtggccttcgttcgaaacgggtatatcttcgcataaaatctagacagaagcattctcagaaaatactttgtgatgattgagtttaaatcacagagctgaccattcctttggatggagcatgtttgagacacactttttgtagaatctacaagtggatatttggacctctctgaggatttcgttggaaacgggataactgcacctaactaaacggaagcattctcagaaactgctttgtgatgattgcattcacctcacagagttgaacattcctattgatagagcagtttggaaacactcttgttgtggaatgtgcaagtggagatttggagcgctttgaggcctatggtagtaaagggaatagcttcatagaaaaactagacagatgcattctcaggaaccttttggtgatgtttgtattcaactcccagagttgaactttcctttggaaagagcagctatgaaacactctttttctagaatctgcaagtggacgtttggagggctttgtggtttgtggtggaaaaggaaatatcttcacctaaatactagacagaagcattctcagaagcttctctgtgatgactgcattcaactcacggagttgaacactccttttgagagcgcagttttgaaactctctttctgtggcatctgcaaggggacatgtagacctctttgaagatttcgttggaaacggaataatcttcacataaaaactatacagaagcagtctcagaattttcttggtgatgtttgcattcaaatcccagagttgaactttcctttcaaagttcacttttgaaacactctttttgcaggatctacaagtggatatttggaccactatgtgtccttcgtttgaaacgggtatatcttcacatgacatctagacagaagctttctcagaaaattctttgggatgattgagttgaactcacagagctgaacattccttgcgatgtagcagtttagaaacacactttctgcagaatctgcaagtgcatattaggacctctctgaggaattcgttggaaacgggataatttcagctgactaaacagaagcattctcagaaccttcttcgtgatgtctgcattcaactcacagtgtggaacctttctttgatagttcaggtttgaaacactctttttgtagaaactgcaaggggataattgcacttctttgaggcctaccgtagtaaaggaaataacttcctataaaaagaagacagaagcattctcagaaccctcttcgtgatgtttgcattcaactcacagtgctgaacctttctttgatagttcagctttgaaacactcttcttgtagaaactgcaagtggatatttggtcctctctgaggatttcgttggaaacgggataaaccgcacagaactaaacagaagaattctcagagccctcttcgtgatgtttgcattcaactcacagtgctgaacctttctttgatagtgcagctttgaaacactctttttgtagaaactgcaagtggatgtttggtcctctctgaggatttcgttggaaacgggataaaccgcacagaactaaaacagaagcattgtcagaaacttctttgtgatgattgcattcaactcacagagttgaaggttccttttcaaacagcagtttccaatcactctttctgtggaatctgcaagtggatatttgggcctctctgaggatttcgttggaaacgggataaaacgcacagaactaaaacagaagcattctcagaaacttctctgtgatgtttgtgttcaactcccagagtttcacgttgcttttcatagagtagttctgaaacatgcttttcgtagtgtctgcaagtggacatttggagcgctttcaggcctgtggtggaaaacgaattatggtcacataaaaactggagagaagccttctcagaaacttctctgtgatgattgcattcaactcacagagttgaaccctcctatggatagagcagtgttgaaactctctttttgtggaatctgcaagtggatatgtggacctctccgaagatgtctttggaaacgggaatatcttcacataaaaactaaacagaagcattctcagaaacttcttggtgatgtttgcattcaaatcccagagttgaaccttcctttgatagttcaggtttgaaacactctttctgtaggatctgcaagtggctatttggaccactctgtggccttcgttcgaaacgggtatatcttcgcataaaatctagacagaagcattctcagaaaatactttgtgatgattgagtttaaatcacagagctgaccattcctttggatggagcaggtttgagacacactttttgtagaatctacaagtggatatttggacctctctgaggatttcgttggaaacgggataactgcacctaactaaacggaagcattctcagaaactgctttgtgatgattgcattcacctcacagagttgaacattcctattgatagagcagtttggaaacactcttgttgtggaatgtgcaagtggagatttggagcgctttgaggcctatggtagtaaagggaatagcttcatagaaaaactagacagatgcattctcaggaactttttggtgatgtttgtattcaactcccagagttgaactttcctttggaaagagcagctatgaaacactctttttctagaatctgcaagtggacgtttggagggctttgtggtttgtggtggaaaaggaaatatcttcacctaaatactagatagaagcatcctcagaagcttctctgtgatgactgcattcaactcacggagttgaacactccttttgagagcgcagttttgaaactctctttctgtggcatctgcaaggggacatgtagacgtctttgaagatttcgttggaaacggaatcatcttcacataaaaactacacagaagcagtctcagaatcttctttgtgatgtttgcattcaaatccccgagttgaactttcctttcaaagttcacgtttgaaacactctttttgcaggatctacaagtggatatttggaccactctgtgtccttcgttcgaaacgggtatatcttcacatgacatctagacagaagctttctcagaaaattctttgggatgattgagttgaactcacagagctgagcattccttgcgatgtagcagtttagaaacacactttctgcagaatctgcaagtgcatatttggacctctgtgaggaattcgttggaaacgggataatttcagctgactaaacagaagcattctcagaaccttcttcgtgatgtctgcattcaactcacagtgtggaacctttctttgatagttcaggtttgaaacactctttttgtagaaactgcaaggggataattgcactctttgaggagtaccgtagtaaaggaaataacttcctataaaaagaagacagaagcattctcagtaaccctcttcgtgatgtttgcattcaactcacagtgctgaacctttctttgatagttcagctttgaaacactctttttgtagaaactgcaagtggatatttggtcctctctgaggatttcgttggaaacgggataaactgcacagaactaaacagaagcattctcagaaccttcttcgtgatgtttgcattcaactcacagtgttgaacctttctttgatagttcaggtttgaaacggtctttctgtagaaactgcaagtagatatttggacctctctgaggatttcgttggaaacgggataacccgcacagaactaaaacagaagcattcacagaaaactcttggtgacgactgagtttaactcacagagctgaacattcctttggatggagcagtttcgaaacacactatttgtagaatgtgcaagtggatatttaggcctctctgaggatttcgttggaaacgggataaaccgcacagaactaaacagaagcattctcagaaactactttgtgatgattgcattcaagtcacagagttgaacattccctttgacagagcagtttggaaactctctttgtgtagaatctgcaagtggagatatggaccgctttgaggcctatggtagtaaaggaaatagcttcatataaaagctagacagtagcattctcagaaacttctttgtgatgcttgcattcaactcacagagttgaactttcctttcgagagagaagctttgaaacactctttttccagaatctgcaagtggacatttggagggctttgaggcctgtggtggaaaaggaattatcttcccgtaaaagctagatagaagcattgtcagaaacttctttgtgatgattgcattcaactcacagagttgaaggttccttttcaaagagcagtttccaatcactctttctgtggaatctgcaagtggatatttggacctattttgaagatttcgttggaaacgggagaatcttcacaggaaagctaaacagaagcattctcagaaacttctctgtgatgtttgtgttcaactcccagagtttcacattgcttttcatagagtagttctgaaacatgcttttcgtagtgtctacaagtggacatttggagcgctttcaggcctgtggtggaaaacgaattatggtcacataaaaactggagagaagccttctcagaaacttctctgtgatgattgcattcaactcacagagttgaaccctcctatggatagagcagtgttgaaactctctttttgtggaatctgcaagtggatatgtggacctctccgaagatgtctttggaaacgggaatatcttcacataaaaactaaacagaagcattctcagcaaacttcttggtgatgtttgcattcaaatcccagagttgaaccttcctttgatagttcaggtttgaaacactctttttgtaggatctgcaagtggatatttggaccactctgtggccttcgttcgaaatgggtatatcttcgcataaaatctagacagaagcattctcagaaaatactttgtgatgattgagttgaactcacagagctgaacattcctttggatggagcaggtttgagacacactttttgtagaatctacaagtggatatttggacctctctgaggatttcgttggaaacgggataactgcacctaactaaacggaagcattctcagaaactgctttgtgatgattgcattcacctcacagagttgaacattcctattgatagagcagtttggaaacactcttgttgtggaatgtgcaagtggagatttggagcgctttgaggcctatggtagtaaagggaatagcttcatagaaaaactagacagatgcattctcaggaactttttggtgatgtttgtattcaactcccagagttgaactttcctttggaaagagcagctatgaaacactctttttctagaatctgcaagtggacgtttggagggctttgtggtttgtggtggaaaaggaaatatcttcacctaaatactagatagaagcattctcagaagcttctctgtgatgactgcattcaactcacggagttgaacactccttttgagagcgcagttttgaaactctctttctgtggcatctgcaaggggacatgtagacctctttgaagatttcgttggaaacggaatcatcttcacataaaaactatacagaagcagtctcagaatcttctttgtgatgtttgcattcaaatcccagagttgaactttcctttcaaagttcacgtttgaaacactctttttgcaggatctacaagtggatatttggaccactctgtgtccttcgttcgaaacgggtatatcttcacacgacatctagacagaagctttctcagaaaattctttgggatgattgagtggaactcacagagctgaacattccttgcgatgtagcagtttagaaacacactttctgcagaatctgcaagtgcatatttggacctctctgaggaattcgttggaaacgggataatttcagctgactaaacagaagcattctcagaaccttcttcgtgatgtctgcattcaactcacagtgtggaaactttctttgatagttcaggtttgaaacactctttttgtagaaactgcaaggggataattgcacttctttgaggcctaccgtagtaaaggaaataacttcctatagaaagaagacagaagcattctcagaaccctcttcgtgatgtttgcattcaactcacagtgctgaacctttctttgatagttcagctttgaaacactcttcttgtagaaactgcaagtggatatttggtcctctctgaggatttcgttggaaacgggataaaccgcacagaactaaacagaagaattctcagagccctcttcgtgatgtttgcattcaactcacagtgctgaacctttctttgatagtgcagctttgaaacactctttttgtagaaactgcaagtggatgtttggtcctctctgaggatttcgttggaaacgggataaaccgcacagaactaaaacagaagcattgtcagaaacttctttgtgatgattgcattcaactcacagagttgaaggttccttttcaaacagcagtttccaatcactctttctgtggaatctgcaagtggatatttgggcctctctgaggatttcgttggaaacgggataaaacgcacagaactaaaacagaagcattctcagaaacttctctgtgatgtttgtgttcaactcccagagtttcacgttgcttttcatagagtagttctgaaacatgcttttcgtagtgtctgcaagtggacatttggagcgctttcaggcctgtggtggaaaacgaattatggtcacataaaaactggagagaagcattctcagaaaatactttgtgatgattgagtttaaatcacagagctgaccattcctttggatggagcaggtttgagacacactttttgtagaatctacaagtggatatttggacctctctgaggatttcgttggaaacgggataactgcacctaactaaacggaagcattctcagaaactgctttgtgatgattgcattcacctcacagagttgaacattcctattgatagagcagtttggaaacactcttgttgtggaatgtgcaagtggagatttggagcgctttgaggcctatggtagtaaagggaatagcttcatagaaaaactagacagatgcattctcaggaactttttggtgatgtttgtattcaactcccagagttgaactttcctttggaaagagcagctatgaaacactctttttctagaatctgcaagtggacgtttggagggctttgtggtttgtggtggaaaaggaaatatcttcacctaaatactagatagaagcattctcagaagcttctctgtgatgactgcattcaactcacggagttgaacactccttttgagagcgcagttttgaaactctctttctgtggcatctgcaaggggacatgtagacctctttgaagatttcgttggaaacggaatcatcttcacataaaaactatacagaagcagtctcagaatcttctttgtgatgtttgcattcaaatcccagagttgaactttcctttcaaagttcacgtttgaaacactctttttgcaggatctacaagtggatatttggaccactctgtgtccttcgttcgaaacgggtatatcttcacacgacatctagacagaagctttctcagaaaattctttgggatgattgagtggaactcacagagctgaacattccttgcgatgtagcagtttagaaacacactttctgcagaatctgcaagtgcatatttggacctctctgaggaattcgttggaaacgggataatttcagctgactaaacagaagcattctcagaaccttcttcgtgatgtctgcattcaactcacagtgtggaacctttctttgatagttcaggtttgaaacactctttttgtagaaactgcaaggggataattgcacttctttgaggcctaccgtagtaaaggaaataacttcctatagaaagaagacagaagcattctcagaaccctcttcgtgatgtttgcattcaactcacagtgctgaacctttctttgatagttcagctttgaaacactcttcttgtagaaactgcaagtggatatttggtcctctctgaggatatcgttggaaacgggataaaccgcacagaactaaacagaagcattctcagaaccttcttcgtgatgtttgcattcaactcacagtgttgaacctttctttgatagttcaggtttgaaacggtctttctgtagaaactgcaagtagatatttggacctctctgaggatttcgttggaaacgggataacccgcacagaactaaaacagaagcattcacagaaaactcttggtgacgactgagtttaactcacagagctgaacattcctttggatggagcagtttcgaaacacactatttgtagaatgtgcaagtggatatttgggcctctctgaggatttcgttggaaacgggataaaccgcacagaactaaacagaagcattctcagaaactactttgtgatgattgcattcaagtcacagtagttgaacattccctttgacagagcagtttggaaactctctttgtgtagaatctgcaagtggagatatggaccgctttgaggcctatggtagtaaaggaaatagcttcatataaaagctagacagtagcattctcagaaacttctttgtgatgcttgcattcaactcacagagttgaactttcctttcgagagagaagctttgaaacactctttttccagaatctgcaagtggacatttggagggctttgaagcctgtggtggaaaaggaattaacttcccgtaaaagctagatagaagcattgtcagaaacttctttgtgatgattgcattcaactcacagagttgaaggttccttttcaaagagcagtttccaatcactctttgtgtggaatctgcaagtggatattcggacctattttgaagatttcgttggaaacgggagaatcttcacaggaaagctaaacagaagcattctcagaaacttctctgtgatgtttgtgttcaactcccagagtttcacattgcttttcatagagtagttctgaaacatgcttttcgtagtgtctacaagtggacatttggagcgctttcaggcctgtggtggaaaacgaattatggtcacataaaaactggagagaagccttctcagaaacttctctgtgatgattgcattcaactcacagagttgaaccctcctatggatagagcagtgttgaaactctctttttgtggaatctgcaagtggatatgtggacctctccgaagatgtctttggaaacgggaatatcttcacataaaaactaaacagaagcattctcagaaacttcttggtgatgtttgcattcaaatcccagagttgaaccttcctttgatagttcaggtttgaaacactctttttgtaggatctgcaagtggatatttggaccactctgtggccttcgttcgaaacgggtatatcttcgcataaaatctagacagaagcattctcagaaaatactttgtgatgattgagtttaactcacagagctgaacattcctttggatggagcaggtttgagacacactttttgtagaatctacaagtggatatttggacctctctgaggatttcgttggaaacgcgataactgcacctaactaaacggaagcattctcagaaactgctttgtgatgattgcattcacctcacagagttgaacattcctattgatagagcagtttggaaacactcttgttgtggaatgtgcaagtggagatttggagcgctttgaggcctatggtagtaaagggaatagcttcatagaaaaactagacagatgcattctcaggaactttttggtgatgtttgtattcaactcccagagttgaactttcctttggaaagagcagctatgacacactctttttctagaatctgcaagtggacgtttggagggctttgtggtttgtggtggaaaaggaaatatcttcacctaaatactagatagaagcattctcagaagcttctctgtgatgactgcattcaactcacggagttgaacactccttttgagagcgcagttttgaaactctctttctgtggcatctgcaaggggacatgtagacctctttgaagatttcgtaggaaacggaatcatcttcacataaaaactatacagaagcagtctcagaatcttctttgtgatgtttgcattcaaatcccagagttgaactttcctttcaaagttcacgtttgaaacactctttttgcaggttctacaagtggatatttggaccactctgtgtccttcgttcgaaacgggtatatcttcacatgacatctagacagaagctttctcagaaaattctttgggatgattgagtggaactcacagagctgaacattccttgcgatgtagcagtttagaaacacactttctgcagaatctgcaagtgcatatttggacctctctgaggaattcgttggaaacgggataatttcagctgactaaacagaagcattctcagaaccttcttcgtgatgtctgcattcaactcacagtgtggaacctttctttgatagttcaggtttgaaacactctttttgtagaaactgcaaggggataattgcacttctttgaggcctaccgtagtaaaggaaataacttcctatagaaagaagacagaagcattctcagaaccctcttcgtgatgtttgcattcaactcacagtgctgaacctttctttgatagttcagctttgaaacactcttcttgtagaaactgcaagtggatatttggtcctctctgaggatttcgttggaaacgggataaaccgcacagaactaaacagaagcattctcagagccctcttcgtgatgtttgcattcaactcacagtgctgaacctttctttgatagtgcagctttgaaacactctttttgtagaaactgcaagtggatgtttggtcctctctgaggatttcgttggaaacgggataaaccgcacagaactaaaacagaagcattgtcagaaacttctttgtgatgattgcattcaactcacagagttgaaggttccttttcaaacagcagtttccaatcactctttctgtggaatctgcaagtggatatttgggcctctctgaggatttcgttggaaacgggataaaacgcacagaactaaaacagaagcattctcagaaacttctctgtgatgtttgtgttcaactcccagagtttcacgttgcttttcatagagtagttctgaaacatgcttttcgtagtgtctgcaagtggacatttggagcgctttcaggcctgtggtggaaaacgaattatggtcacataaaaactggagagaagccttctcagaaacttctctgtgatgattgcattcaactcacagagttgaaccctcctatggatagagcagtgttgaaactctctttttgtggaatctgcaagtggatatgtggacctctccgaagatgtctttggaaacgggaatatcttcacataaaaactaaacagaagcattctcagaaacttcttggtgatgtttgcattcaaatcccagagttgaaccttcctttgatagttcaggtttgaaacactctttttgtaggatctgcaattggctatttggaccactctgtggccttcgttcgaaacgggtatatcttcgcataaaatctagacagaagcattctcagaaaatactttgtgatgattgagtttaaatcacagagctgaccattcctttggatggagcaggtttgagacacactttttgtagaatctacaagtggatatttggacctctctgaggatttcgttggaaacgggataactgcacctaactaaacggaagcattctcagaaactgctttgtgatgattgcattcacctcacagagttgaacattcctattgatagagcagtttggaaacactcttgttgtggaatgtgcaagtggagatttggagcgctttgaggcctgtggtagtaaagggaatagcttcatagaaaaactagacagatgcattctcaggaactttttggtgatgtttgtattcaactcccagagttgaactttcctttggaaagagcagctatgaaacactctttttctagaatctgcaagtggacgtttggagggctttgtggtttgtggtggaaaaggaaatatcttcacctaaatactagacagaagcattctcagaagcttctctgtgatgactgcattcaactcacggagttgaacactccttttgagagcgcagttttgaaactctctttctgtggcatctgcaaggggacatgtagacctctttgaagatttcgttggaaacggaatcatcttcacataaaaactatacagaagcagtctcagaatcttctttgtgatgtttgcattcaaatcccagagttgaactttcctttcaaagttcacgtttgaaacactctttttgcaggatctacaagtggatatttggaccactctgtgtccttcgttcgaaacgggtatatcttcacatgacatctagacagaagctttctcagaaaattctttgggatgattgagtggaactcacagagctgaacattccttgcgatgtagcagtttagaaacacactttctgcagaatctgcaagtgcatatttggacctctctgaggaattcgttggaaacgggataatttcagctgactaaacagaagcattctcagaaccttcttcgtgatgtctgcattcaactcacagtgtggaacctttctttgatagttcaggtttgaaacactctttttgtagaaactgcaaggggataattgcacttctttgaggcctaccgtagtaaaggaaataacttcctatagaaagaagacagaagcattctcagaaccctcttcgtgatgtttgcattcaactcacagtgctgaacctttctttgatagttcagctttgaaacactcttcttgtagaaactgcaagtggatatttggtcctctctgaggatttcgttggaaacgggataaaccgcacagaactaaacagaagaattctcagagccctcttcgtgatgtttgcattcaactcacagtgctgaacctttctttgatagtgcagctttgaaacactctttttgtagaaactgcaagtggatgtttggtcctctctgaggatttcgttggaaacgggataaaccgcacagaactaaaacagaagcattgtcagaaacttctttgtgatgattgcattcaactcacagagttgaaggttccttttcaaacagcagtttccaatcactctttctgtggaatctgcaagtggatatttgggcctctctgaggatttcgttggaaacgggataaaacgcacagaactaaaacagaagcattctcagaaacttctctgtgatgtttgtgttcaactcccagagtttcacgttgcttttcatagagtagttctgaaacatgcttttcgtagtgtctgcaagtggacatttggagcgctttcaggcctgtggtggaaaacgaattatggtcacataaaaactggagagaagccttctcagaaacttctctgtgatgattgcattcaactcacagagttgaaccctcctatggatagagcagtgttgaaactctctttttgtggaatctgcaagtggatatgtggacctctccgaagatgtctttggaaacgggaatatcttcacataaaaactaaacagaagcattctcagaaacttcttggtgatgtttgcattcaaatcccagagttgaaccttcctttgatagttcaggtttgaaacactctttctgtaggatctgcaagtggctatttggaccactctgtggccttcgttcgaaacgggtatatcttcgcataaaatctagacagaagcattctcagaaaatactttgtgatgattgagtttaaatcacagagctgaccattcctttggatggagcaggtttgagacacactttttgtagaatctacaagtggatatttggacctctctgaggatttcgttggaaacgggataactgcacctaactaaacggaagcattctcagaaactgctttgtgatgattgcattcacctcacagagttgaacattcctattgatagagcagtttggaaacactcttgttgtggaatgtgcaagtggagatttggagcgctttgaggcctatggtagtaaagggaatagcttcatagaaaaactagacagatgcattctcaggaaccttttggtgatgtttgtattcaactcccagagttgaactttcctttggaaagagcagctatgaaacactctttttctagaatctgcaagtggacgtttggagggctttgtggtttgtggtggaaaaggaaatatcttcacctaaatactagatagaagcattctcagaagcttctctgtgatgactgcattcaactcacggagttgaacactccttttgagagcgcagttttgaaactctctttctgtggcatctgcaaggggacatgtagacctctttgaagatttcgttggaaacggaatcatcttcacataaaaactatacagaagcagtctcagaatcttctttgtgatgtttgcattcaaatcccagagttgaactttcctttcaaagttcacgtttgaaacactctttttgcaggatctacaagtggatatttggaccactctgtgtccttcgttcgaaacgggtatatcttcacacgacatctagacagaagctttctcagaaaattctttgggatgattgagtggaactcacagagctgaacattccttgcgatgtagcagtttagaaacacactttctgcagaatctgcaagtgcatatttggacctctctgaggaattcgttggaaacgggataatttcagctgactaaacagaagcattctcagaaccttcttcgtggtgtctgcattcaactcacagtgtggaacctttctttgatagttcaggtttgaaacactctttttgtagaaactgcaaggggataattgcacttctttgaggcctaccgtagtaaaggaaataacttcctatagaaagaagacagaagcattctcagaaccctcttcgtgatgtttgcattcaactcacggtgctgaatctttctttgatagttcagctttgaaacactctttttgtagaaactgcaagtggatatttggtcctgtctgaggatttcgttggtaacgggataaaccgcacagaactaaacagaagcattctcagaaccttcttcgtgatgtttgcattcaactcacagtgttgaacctttctttgatagttcaggtttgaaacggtctttctgtagaaactgcaagtagatatttggacctctctgaggatttcgttggaaacgggataacccgcacagaactaaaacagaagcattcacagaaaactcttggtgacgactgagtttaactcacagagctgaacattcctttggatggagcagtttcgaaacacactatttgtagaatgtgcaagtggatatttaggcctctctgaggatttcgttggaaacgggataaaccgcacagaactaaacagaagcattctcagaaactactttgtgatgattgcattcaagtcacagagttgaacattccctttgacagagcagtttggaaactctctttgtgtagaatctgcaagtggagatatggaccgctttgaggcctatggtagtaaaggaaatagcttcatataaaagctagacagtagcattctcagaaacttctttgtgatgcttgcattcaactcacagagttgaactttcctttcgagagagaagctttgaaacactctttttccagaatctgcaagtggacatttggagggctttgaggcctgtggtggaaaaggaattatcttcccgtaaaagctagatagaagcattgtcagaaacttctttgtgatgattgcattcaactcacagagttgaaggttccttttcaaagagcagtttccaatcactctttctgtggaatctgcaagtggatatttggacctattttgaagatttcgttggaaacgggagaatcttcacaggaaagctaaacagaagcattctcagaaacttctctgtgatgtttgtgttcaactcccagagtttcacattgcttttcatagagtagttctgaaacatgcttttcgtagtgtctacaagtggacatttggagcgctttcaggcctgtgttggaaaacgaattatggtcacataaaaactggagagaagccttctcagaaacttctctgtgatgattgcattcaactcacagagttgaaccctcctatggatagagcagtgttgaaactctctttttgtggaatctgcaagtggatatgtggacctctccgaagatgtctttggaaacgggaatatcttcacataaaaactaaacagaagcattctcagaaacttcttggtgatgtttgcattcaaatcccagagttgaaccttcctttgatagttcaggtttgaaacactctttttgtaggatctgcaagtggatatttggaccactctgtggccttcgttcgaaacgggtatatcttcgcataaaatctagacagaagcattctcagaaaatactttgtgatgattgagtttaactcacagagctgaacattcctttggatggagcaggtttgagacacaccttttgtagaatctacaagtggatatttggacctctctgaggatttcgttggaaacgggataactgcacctaactaaacggaagcattctcagaaactgctttgtgatgattgcattcacctcacagagttgaacattcctattgatagagcagtttggaaacactcttgttgtggaatgtgcaagtggagatttggagcgctttgaggcctatggtagtaaagggaatagcttcatagaaaaactagacagatgcattctcaggaactttttggtgatgtttgtattcaactcccagagttgaactttcctttggaaagagcagctatgaaacactctttttctagaatctgcaagtggacgtttggagggctttgtggtttgtggtggaaaaggaaatatcttcacctaaatactagatagaagcatcctcagaagcttctctgtgatgactgcattcaactcacggagttgaacactccttttgagagcgcagttttgaaactctctttctgtggcatctgcaaggggacatgtagacctctttgaagatttcgttggaaacggaatcatcttcacataaaaactatacagaagcagtctcagaatcttctttgtgatgtttgcattcaaatccccgagttgaactttcctttcaaagttcacgtttgaaacactctttttgcaggatctacaagtggatatttggaccactctgtgtccttcgttcgaaacgggtatatcttcacatgacatctagacagaagctttctcagaaaattcttctcgggatgattgagttgaactcacagagctgagcattccttgcgatgtagcagtttagaaacacactttctgcagaatctgcaagtgcatatttggacctctgtgaggaattcgttggaaacgggataatttcagctgactaaacagaaacattctcagaaccttcttcgtgatgtctgcattcaactcacagtgtggaacctttctttgatagttcaggtttgaaacactctttttgtagaaactgcaaggggataattgcacttctttgaggcctaccgtcgtaaaggaaataacttcctatagaaagaagacagaagcattctcagaaccctcttcgtgatgtttgcattcaactcacagtgctgaacctttctttgatagttcagctttgaaacactcttcttgtagaaactgcaagtggatatttggtcctctctgaggatttcgttggaaacgggataaaccgcacagaactaaacagaagaattctcagagccctcttcgtgatgtttgcattcaactcacagtgctgaacctttctttgatagtgcagctttgaaacactctttttgtagaaactgcaagtggatgtttggtcctctctgaggatttcgttggaaacgggataaaccgcacagaactaaaacagaagcattgtcagaaacttctttgtgatgattgcattcaactcacagagttgaaggttccttttcaaacagcagtttccaatcactctttctgtggaatctgcaagtggatatttgggcctctctgaggatttcgttggaaacgggataaaacgcacagaactaaaacagaagcattctcagaaacttctctgtgatgtttgtgttcaactcccagagtttcacgttgcttttcatagagtagttctgaaacatgcttttcgtagtgtctgcaagtggacatttggagcgctttcaggcctgtggtggaaaacgaattatggtcacataaaaactggagagaaagccttctcagaaacttctctgtgatgattgcattcaactcacagagttgaaccctcctatggatagagcagtgttgaaactctctttttgtggaatctgcaagtggatatgtggacctctccgaagatgtctttggaaacgggaatatcttcacataaaaactaaacagagcattctcagaaacttcttggtgatgtttgcattcaaatcccagagttgaaccttcctttgatagttcaggtttgaaacactctttctgtaggatctgcaagtggctatttggaccactctgtggccttcgttcgaaacgggtatatcttcgcataaaatctagacagaagcattctcagaaaatactttgtgatgattgagtttaaatcacagagctgaccattcctttggatggagcaggtttgagacacactttttgtagaatctacaagtggatatttggacctctctgaggatttcgttggaaacgggataactgcacctaactaaacggaagcattctcagaaactgctttgtgatgattgcattcacctcacagagttgaacattcctattgatagagcagtttggaaacactcttgttgcggaatgtgcaagtggagatttggagcgctttgaggcctgtggtagtaaagggaatagcttcatagaaaaactagacagatgcattctcaggaaccttttggtgatgtttgtattcaactcccagagttgaactttcctttggaaagagcagctatgaaacactctttttctagaatctgcaagtggacgtttggagggctttgtggtttgtggtggaaaaggaaatatcttcacctaaatactagatagaagcattctcagaagcttctctgtgatgactgcattcaactcacggagttgaacactccttttgagagcgcagttttgaaactctctttctgtggcatctgcaaggggacatgtagacctctttgaagatttcgttggaaacggaatcatcttcacataaaaactatacagaagcagtctcagaatcttctttgtgatgtttgcattcaaatcccagagttgaactttcctttcaaagttcacgtttgaaacactctttttgcaggatctacaagtggatatttggaccactctgtgtccttcgttcgaaacgggtatatcttcacacgacatctagacagaagctttctcagaaaattctttgggatgattgagtggaactcacagagctgaacattccttgcgatgtagcagtttagaaacacactttctgcagaatctgcaagtgcatatttggacctctctgaggaattcgttggaaacgggataatttcagctgactaaacagaagcattctcagaaccttcttcgtgatgtctgcattcaactcacagtgtggaacctttctttgatagttcaggtttgaaacactctttttgtagaaactgcaaggggataattgcacttctttgaggcctaccgtagtaaaggaaataacttcctatagaaagaagacagaagcattctcagaaccctcttcgtgatgtttgcattcaactcacagtgctgaacctttctttgatagttcagctttgaaacactcttcttgtagaaactgcaagtggatatttggtcctctctgaggatttcgttggaaacgggataaaccgcacagaactaaacagaagaattctcagagccctcttcgtgatgtttgcattcaactcacagtgctgaacctttctttgatagtgcagctttgaaacactcttcttgtagaaactgcaagtggatgtttggtcctctctgaggatttcgttggaaacgggataaaccgcacagaactaaacagaagcattgtcagaaacttctttgtgatgattgcattcaactcacagagttgaaggttccttttcaaacagcagtttccaatcactctttctgtggaatctgcaagtggatatttgggcctctctgaggatttcgttggaaacgggataaaacgcacagaactaaaacagaagcattctcagaaacttctctgtgatgtttgtgttcaactcccagagtttcacgttgcttttcatagagtagttctgaaacatgcttttcgtagtgtctgcaagtggacatttggagcgctttcaggcctgtggtggaaaacgaattatggtcacataaaaactggagagaagccttctcagaaacttctctgtgatgattgcattcaactcacagagttgaaccctcctatggatagagcagtgttgaaactctctttttgtggaatctgcaagtggatatgtggacctctccgaagatgtctttggaaacgggaatatcttcacataaaaactaaacagaagcattctcagaaacttcttggtgatgtttgcattcaaatcccagagttgaaccttcctttgatagttcaggtttgaaacactctttttgtaggatctgcaagtggctatttggaccactctgtggccttcgttcgaaacgggtatatcttcgcataaaatctagacagaagcattctcagaaaatactttgtgatgattgagtttaaatcacagagctgaccattcctttggatggagcaggtttgagacacactttttgtagaatctacaagtggatatttggacctctctgaggatttcgttggaaacgggataactgcacctaactaaacggaagcattctcagaaactgctttgtgatgattgcattcacctcacagagttgaacattcctattgatagagcagtttggaaacactcttgttgtggaatgtgcaagtggagatttggagcgctttgaggcctatggtagtaaagggaatagcttcatagaaaaactagacagatgcattctcaggaactttttggtgatgtttgtattcaactcccagagttgaactttcctttggaaagagcagctatgaaacactctttttctagaatctgcaagtggacgtttggagggctttgtggtttgtggtggaaaaggaaatatcttcacctaaatactagatagaagcattctcagacgcttctctgtgatgactgcattcaactcacggagttgaacactccttttgagagcgcagttttgaaactctctttctgtggcatctgcaaggggacatgtagacctctttgaagatttcgttggaaacggaatcatcttcacataaaaactatacagaagcagtctcagaatcttctttgtgatgtttgcattcaaatcccagagttgaactttcctttcaaagttcacgtttgaaacactctttttgcaggatctacaagtggatatttggaccactctgtgtccttcgttcgaaacgggtatatcttcacacgacatctagacagaagctttctcagaaaattctttgggatgattgagtggaactcacagagctgaacattccttgcgatggagcagtttagaaacacactttctgcagaatctgcaagtgcatatttggacctctctgaggaattcgttggaaacgggataatttcagctgactaaacagaagcattctcagaaccttcttcgtgatgtctgcattcaactcacagtgtggaacctttctttgatagttcaggtttgaaacactctttttgtagaaactgcaaggggataattgcacttctttgaggcctaccgtagtaaaggaaataacttcctatagaaagaagacagaagcattctcagaaccctcttcgtgatgtttgcattcaactcacagtgctgaacctttctttgatagttcagctttgaaacactcttcttgtagaaactgcaagtggatatttggtcctctctgaggatttcgttggaaacgggataaaccgcacagaactaaacagaagaattctcagagccctcttcgtgatgtttgcattcaactcacagtgctgaacctttctttgatagtgcagctttgaaacactctttttgtagaaactgcaagtggatgtttggtcctctctgaggatttcgttggaaacgggataaaccgcacagaactaaaacagaagcattgtcagaaacttctttgtgatgattgcattcaactcacagagttgaaggttccttttcaaacagcagtttccaatcactctttctgtggaatctgcaagtggatatttgggcctctctgaggatttcgttggaaacgggataaaacgcacagaactaaaacagaagcattctcagaaacttctctgtgatgtttgtgttcaactcccagagtttcacgttgcttttcatagagtagttctgaaacatgcttttcgtagtgtctgcaagtggacatttggagcgctttcaggcctgtggtggaaaacgaattatggtcacataaaaactggagagaagcattctcagaaaatactttgtgatgattgagtttaaatcacagagctgaccattcctttggatggagcaggtttgagacacactttttgtagaatctacaagtggatatttggacctctctgaggatttcgttggaaacgggataactgcacctaactaaacggaagcattctcagaaactgctttgtgatgattgcattcacctcacagagttgaacattcctattgatagagcagtttggaaacactcttgttgtggaatgtgcaagtggagatttggagcgctttgaggtctatggtagtaaagggaatagcttcatagaaaaactagacagaatgcattctcaggaactttttggtgatgtttgtattcaactcccagagttgaactttcctttggaaagagcagctatgaaacactctttttctagaatctgcaagtggacgtttggagggctttgtggtttgtggtggaaaaggaaatatcttcacctaaatactagatagaagcattctcagaagcttctctgtgatgactgcattcaactcacggagttgaacactccttttgagagcgcagttttgaaactctctttctgtggcatctgcaaggggacatgtagacctactttgaagatttcgttggaaacggaatcatcttcacataaaaactatacagaagcagtctcagaatcttctttgtgatgtttgcattcaaatcccagagttgaactttcctttcaaagttcacgtttgaaacactctttttgcaggatctacaagtggatatttggaccactctgtgtccttcgttcgaaacgggtatatcttcacatgacatctagacagaagctttctcagaaaattctttgggatgattgagttgaactcacagagctgaacattccttgcgatggagcagtttagaaacacactttctgcagaatctgcaagtgcatatttggacctctctgaggaattcgttggaaacgggataatttcagctgactaaacagaagcattctcagaaccttcttcgtgatgtctgcattcaactcacagtgtggaacctttctttgatagttcaggtttgaaacactctttttgtagaaactgcaaggggataattgcacttctttgaggcctaccatagtaaaggaaataacttcctataaaaagaagacagaagcattctcagaaccctcttcgtgatgtttgcattcaactcacagtgctgaacctttctttgatagttcagctttgaaacactctttttgtagaaactgcaagtggatacttggtcctctctgaggatttcgttggaaaagggataaaccgcacagaactaaacagaagcattcacagaaaactcttggtgacgactgagtttaactcacagagctgaacattcctttggatggagcagtttcgaaacacactatttgtagaatctgcaagtggatatttgggcctctctgaggatttcgatggaaacgggataaaccgcacagaactaaaacagaagcattctcagaaactactttgtgatgattgcattcaagtcacagagctgaacattccctttgacagagcagtttggaaactctctttgtgtagaatctgcaagtggagatatggaatgctttgaggactatggtagtaaaggaaatagcttcatataaaagctagacagtagcattctcagaaacttctttgtgatgcttgcattcaactcacagagttgaactttcctttcgagagagaagctttgaaacactctttttccagaatctgcaagtggacatttggagggctttgaggcctgtggtggaaaaggaattatcttcccgtaaaagctagatagaagcattgtcagaaacttctttgtgatgattgcattcaactcacagagttgaaggttccttttcaaagagcagtttccaatcactctttctgtggaatctgcaagtggatatttggacctattttgaagatttcgttggaaacgggagaatcttcacaggaaagctaaacagaagcattctcagaaacttctctgtgatgtttgtgttcaactcccagagtttcacattgcttttcatagagtagttctgaaacatgcttttcgtagtgtctacaagtggacatttggagcgctttcaggcctgtggtggaaaacgaattatggtcacataaaaactggagagaagccttctcagaaacttctctgtgatgattgcattcaactcacagagttgaaccctcctatggatagagcagtgttgaaactctctttttgtggaatctgcaagtggatatgtggacctctccgaagatgtctttggaaacgggaatatcttcacataaaaactaaacagaagcattctcagaaacttcttggtgatgtttgcattcaaatcccagagtcgaaccttcctttgatagttcaggtttgaaacactctttttgtaggatctgcaagtggatatttggaccactctgtggccttcgttcgaaacgggtatatcttcgcataaaatctagacagaagcattctcagaaaatactttgcgatgattgagtttaactcacagagctgaacattcctttgaatggagcaggtttgagacacactttttgtagaatctacaagtggatatttggacctctctgaggattccgttggaaacgggataactgcacctaactaaacggaagcattctcagaaactgctttgtgatgattgcattcacctgacagagttgaacattcctattgatagagcagtttggaaacactcctgttgtggaatgtgcaagtggagatttggagcgctttgaggcctatggtagtaaagggaataacttcatagaaaaactagacagatgcattctcaggaactttttggtgatgtttgtattcaactcccagagttgaactttcctttggaaagagcagctatgaaacactctttttctagaatctgcaagtggacgtttggagggctttgtggtttgtggtggaaaaggaaatatcttcacctaaatactagatagaagcattctcagaagcttctctgtgatgactgcattcaactcacggagttgaacactccttttgagagcgcagttttgaaactctctttctgtggcatctgcaaggggacatgtagacctctttgaagatttcgttggaaacggaatcatcttcacataaaaactatacagaaagcagtctcagaatcttctttgtgatgtttgcattcaaatcccagagttgaactttcctttcaaagttcacgtttgaaacactctttttgcaggatctacaagtggatatttggaccactctgtgtccttcgttcgaaacgggtatatcttcacacgacatctagacagagctttctcagaaaattttttgggatgattgagttgaactcacagagctgagcattccttgcgatgtagcagtttagaaacacactttctgcagaatctgcaagtgcatatttggacctctgtgaggaattcgttggaaacgggataatttcagctgactaaacagaagcattctcagaaccttcttcgtgatgtctgcattcaactcacagtgtggaacctttctttgatagttcaggtttgaaacactctttttgtagaaactgcaaggggataattgcacttctttgaggcctaccgtagtaaaggaaataacttcctatagaaagaagacagaagcattctcagaaccctcttcgtgatgtttgcattcaactcacagtgctgaacctttctttgatagttcaactttgaaacactcttcttgtagaaactgcaagtggatatttggtcctctctgaggatttctttgtaaacgggataaaccgcacagaactaaacagaagcattctcagaaccttcttcgtgatgtttgcattcaactcacagtgttgaacctttctttgatagttcaggttggaaacggtctttctgtagaaactgcaagtagatatttggacctctctgaggatttcgttggaaacgggataaaccgcacagaactaaaacagaagcattcacagaaaactcttggtgacgactgagtttaactcacagagctgaacattcctttggatggagcagtttcgaaacatactatttgtagaatgtgcaagtggatatttgggcctctctgaggatttcgttggaaacgggataaaccgcacagaactaaacagaagcattctcagaaactactttgtgatgattgcattcaagtcacagagttgaacattccctttgacagagcagtttggaaactctctttgtgtagaatctgcaagtggagatatggaccgctttgaggcctatggtagtaaaggaaatagcttcatataaaagctagacagtagcattctcagaaacttctttgtgatgcttgcattcaactcacagagttgaactttcctttcgagagagaagctttgaaacactctttttccagaatctgcaagtggacatttggagggctttgaggcctgtggtggaaaaggaattatcttcccgtaaaagctagatagaagcattgtcagaaacttctttgtgatgattgcattcaactcacagagttgaaggttccttttcaaagagcagtttccaatcactctttgtgtggaatctgcaagtggatatttggacctattttgaagatttcgttggaaacgggagaatcttcacaggaaagctaaacagaagcattctcagaaacttctctgtgatgtttgtgttcaactcccagagtttcacattgcttttcatagagtagttctgaaacatgcttttcgtagtgtctacaagtggacatttggagcgctttcaggcctgtggtggaaaacgaattatggtcacataaaaactggagagaagccttctcagaaacttctctgtgatgattgcattcaactcacagagttgaaccctcctatggatagagcagtgttgaaactctctttttgtggaatctgcaagtggatatgtggacctctccgaagatgtctttggaaacgggaatatcttcacataaaaactaaacagaagcattctcagaaacttcttggtgatgtttgcattcaaatcccagagttgaaccttcctttgatagttcaggtttgaaacactctttttgtaggatctgcaagtggatatttggaccactctgtggccttcgttcgaaacgggtacatcttcgcataaaatctagacagaagcattctcagaaaatactttgtgatgattgagtttaactcacagagctgaacattcctttggatggagcaggtttgagacacaccttttgtagaatctacaagtggatatttggacctctctgaggatttcgttggaaacgggataactgcacctaactaaacggaagcattctcagaaactgctttgtgatgattgcattcacctcacagagttgaacattcctattgatagagcagtttggaaacactcttgttgtggaatgtgcaagtggagatttggagcgctttgaggcctatggtagtaaagggaatagcttcatagaaaaactagacagatgcattctcaggaactttttggtgatgtttgtattcaactcccagagttgaactttcctttggaaagagcagctatgaaacactgtttttctagaatctgcaagtggacgtttggagggctttgtggtttgtggtggaaaaggaaatatcttcacctaaatactagatagaagcatcctcagaagcttctctgtgatgactgcattcaactcacggagttgaacactccttttgagagcgcagttttgaaactctctttctgtggcatctgcaaggggacatgtagacctctttgaagatttcgttggaaacggaatcatcttcacataaaaactacacagaagcagtctcagaatcttctttgtgatgtttgcattcaaatccccgagttgaactttcctttcaaagttcacgtttgaaacactctttttgcaggatctacaagtggatatttggaccactctgtgtccttcgatcgaaacgggtatatcttcacatgacatctagacagaagctttctcagaaaattctttgggatgattgagttgaactcacagagctgagcattccttgcgatgtagcagtttagaaacacactttctgcagaatctgcaagtgcatatttggacctctgtgaggaattcgttggaaacgggataatttcagctgactaaacagaagcattctcagaaccttcttcgtgatgtctgcattcaactcacagtgtggaacctttctttgatagttcaggtttgaaacactctttttgtagaaactgcaaggggataattgcactctttgaggagtaccgtagtaaaggaaataacttcctataaaaagaagacagaagcattctcagtaaccctcttcgtgatgtttgcattcaactcacagtgctgaacctttctttgatagttcagctttgaaacactctttttgtagaaactgcaagtggatatttggtcctctctgaggaattcgttggaaacgggataaactgcacagaactaaacagaagcattctcagaaccttcttcgtgatgtttgcattcaactcacagtgttgaacctttctttgatagttcaggtttgaaacggtctttctgtagaaactgcaagtagatatttggacctctctgaggatttcgttggaaacgggataacccgcacagaactaaaacagaagcattcacagaaaactcttggtgacgactgagtttaactcacagagctgaacattcctttggatggagcagtttcgaaacacactatttgtagaatgtgcaagtggatatttaggcctctctgaggatttcgttggaaacgggataaaccgcacagaactaaacagaagcattctcagaaactactttgtgatgattgcattcaagtcacagagttgaacattccctttgacagagcagtttggaaactctctttgtgtagaatctgcaagtggagatatggaccgctttgaggcctatggtagtaaaggaaatagcttcatataaaagctagacagtagcattctcagaaacttctttgtgatgcttgcattcaactcacagagttgaactttcctttcgagagagaagctttgaaacactctttttccagaatctgcaagtggacatttggagggctttgaggcctgtggtggaaaaggaattatcttcccgtaaaagctagatagaagcattgtcagaaacttctttgtgatgattgcattcaactcacagagttgaaggttccttttcaaagagcagtttccaatcactctttgtgtggaatctgcaagtggatatttggacctattttgaagatttcgttggaaacgggagaatcttcacaggaaagctaaacagaagcattctcagaaacttctctgtgatgtttgtgttcaactcccagagtttcacattgcttttcatagagtagttctgaaacatgcttttcgtagtgtctacaagtggacatttggagcgctttcaggcctgtggtggaaaacgaattatggtcacataaaaactggagagaagccttctcagaaacttctctgtgatgattgcattcaactcacagagttgaaccctcctatggatagagcagtgttgaaactctctttttgtggaatctgcaagtggatatgtggacctctccgaagatgtctttggaaacgggaatatcttcacataaaaactaaacagaagcattctcagaaacttcttggtgatgtttgcattcaaatcccagagttgaaccttcctttgctagttcaggtttgaaacactctttttgtaggatctgcaagtggatatttggaccactctgtggccttcgttcgaaacgggtacatcttcgcataaaatctagacagaagcattctcagaaaatactttgtgatgattgagtttaaatcacagagctgaccattcctttggatggagcaggtttgagacacactttttgtagaatctacaagtggatatttggacctctctgaggatttcgttggaaacgggataactgcacctaactaaacggaagcattctcagaaactgctttgtgatgattgcattcacctcacagagttgaccattcctattgatagagcagtttggaaacactcttgttgtggaatgtgcaagtggagatttggagcgctttgaggcctatggtagtaaagggaatagcttcatagaaaaactagacagatgcattctcaggaactttttggtgatgtttgtattcaactcccagagttgaactttcctttggaaagagcagctatgaaacactctttttctagaatctgcaagtggacgtttggagggctttgtggtttgtggtggaaaaggaaatatcttcacctaaatactagatagaagcattctcagaagcttctctgtgatgactgcattcaactcacggagttgaacactccttttgagagcgcagttttgaaactctctttctgtggcatctgcaaggggacatgtagacctctttgaagatttcgttggaaacggaatcatcttcacatcaaaactatacagaaagcagtctcagtaatcttctttgtgatgttagcattcaaatcccagagttgaactttcctttcaaagttcacgtttgaaacactctttttgcaggatctacaagtggatatttggaccactctgtgtccttcgttcgaaacggatatatcttcacatgacatctagacagaagctttctcagaaaattctttgggatgattgagtggaactcacagagctgaacattccttgcgatgtagcagtttagaaacacactttctgcagaatctgcaagtgcatatttggacctctctgaggaattcgttggaaacgggataatttcagctgactaaacagaagcattctcagaaccttcttcgtgatgtctgcattcaactcacagtgtggaacctttctttgatagttcaggtttgaaacactctttttgtagaaactgcaaggggataattgcacttctttgaggcctaccgtagtaaaggaaataacttcctatagaaagaagacagaagcattctcagaaccctcttcgtgatgtttgcattcaactcacagtgctgaacctttctttgatagttcagctttgaaacactcttcttgtagaaactgcaagtggatatttggtcctctctgaggatttcgttggaaacgggataaaccgcacagaactaaacagaagaattctcagagccctcttcgtgatgtttgcattcaactcacagtgctgaacctttctttgatagtgcagctttgaaacactctttttgtagaaactgcaagtggatgtttggtcctctctgaggatttcgttggaaacgggataaaccgcacagaactaaaacagaagcattgtcagaaacttctttgtgatgattgcattcaactcacagagttgaaggttccttttcaaacagcagtttccaatcactctttctgtggaatctgcaagtggatatttgggcctctctgaggatttcgttggaaacgggataaaacgcacagaactaaaacagaagcattctcagaaacttctctgtgatgtttgtgttcaactcccagagtttcacgttgcttttcatagagtagttctgaaacatgcttttcgtagtgtctgcaagtggacatttggagcgctttcaggcctgtggtggaaaacgaattatggtcacataaaaactggagagaagccttctcagaaacttctctgtgatgattgcattcaactcacagagttgaaccctcctatggatagagcagtgttgaaactctctttttgtggaatctgcaagtggatatgtggacctctccgaagatgtctttggaaacgggaatatcttcacataaaaactaaacagaagcattctcagaaacttcttggtgatgtttgcattcaaatcccagagttgaaccttcctttgatagttcaggtttgaaacactctttttgtaggatctgcaagtggctatttggaccactctgtggccttcgttcgaaacgggtatatcttcgcataaaatctagacagaagcattctcagaaaatactttgtgatgattgagtttaaatcacagagctgaccattcctttggatggagcaggtttgagacacactttttgtagaatctacaagtggatatttggacctctctgaggatttcgttggaaacgggataactgcacctaactaaacggaagcattctcagaaactgctttgtgatgattgcattcacctcacagagttgaacattcctattgatagagcagtttggaaacactcttgttgtggaatgtgcaagtggagatttggagcgctttgaggcctatggtagtaaagggaatagcatcatagaaaaactagacagatgcattctcaggaactttttggtgatgtttgtattcaactcccagagttgaactttcctttggaaagagcagctatgaaacactctttttctagaatctgcaagtggacgtttggagggctttgtggtttgtggtggaaaaggaaatatcttcacctaaatactagatagaagcattctcagaagcttctctgtgatgactgcattcaactcacggagttgaacactccttttgagagcgcagttttgaaactctctttctgtggcatctgcaaggggacatgtagacctctttgaagatttcgttggaaacggaatcatcttcacataaaaactatacagaagcagtctcagaatcttctttgtgatgtttgcattcaaatcccagagttgaactttcctttcaaagttcacgtttgaaacactctttttgcaggatctacaagtggatatttggaccactctgtgtccttcgttcgaaacgggtatatcttcacaggacatctagacagaagctttctcagaaaattctttgggatgattgagtggaactcacagagctgaacattccttgcgatgtagcagtttagaaacacactttctgcagaatctgcaagtgcatatttggacctctctgaggaattcgttggaaacgggataatttcagctgactaaacagaagcattctcagaaccttcttcgtgatgtctgcattcaactcacagtgtggaacctttctttgatagttcaggtttgaaacactctttttgtagaaactgcaaggggataattgcacttctttgaggcctaccgtagtaaaggaaataacttcctatagaaagaagacagaagcattctcagaaccctcttcgtgatgtttgcattcaactcacagtgctgaacctttctttgatagttcagctttgaaacactcttcttgtagaaactgcaagtggatatttggtcctctctgaggatttcgttggaaacgggataaaccgcacagaactaaacagaagaactctcagagccctcttcgtgatgtttgcattcaactcacagtgctgaacctttctttgatagtgcagctttgaaacactctttttgtagaaactgcaagtggatatttggtcctctctgaggatttcgttggaaacgggataaaccgcacagaactaaaacagaagcattcacagaaaactcttggtgacgactgagtttaactcacagagctgaacattcctttggatggagcagtttcgaaacacactatttgtagaatctgcaagtggatatttgggcctctctgaggatttcgttggaaacgggataaaacgcacagaactaaaacagaagcattctcagaaactactttgtgatgattgcattcaagtcacagagttgaacattccctttgacagagcagtttggaaactctctttgtgtagaatctgcaagtggagatatggaccgctttgaggcctatggtagtaaaggaaagagcttcatataaaagctagacagtagcattctcagaaacttctttgtgatgcttgcattcaactcacagagttgaactttcctttcgagagagaagctttgaaacactctttttccagaatgtgcaagtggacatttggggagctttgaggcctggggtggaaaaggaattatcttcccgtaaaagctagatagaagcattgtcagaaacttctttgtgatgattgcattcaactcacagagttgaaggttccttttcaaacagcagtttccaatcactctttctgtggaatctgcaagtggatatttcgacctctttgaagatttcgttggaaacgggagaatcttcacagaaaagctaaacagaagcattctcagaaacttctctgtgatgtttgtgttcaactcccagagtttcacgttgcttttcatagagtagttctgaaacatgcttttcgtagtgtctgcaagtggacatttggagcgctttcaggcctgtggtggaaaacgaattatggtcacataaaaactggagagaagccttctcagaaacttctctgtgatgattgcattcaactcacagagttgaaccctcctatggatagagcagtgttgaaactctctttttgtggaatctgcaagtggatatgtggacctctccgaagatgtctttggaaacgggaatatcttcacataaaaactaaacagaagcattctcagaaacttcttggtgatgtttgcattcaaatcccagagttgaaccttcctttgatagttcaggtttgaaacactctttctgtaggatctgcaagtggctatttggaccactctgtggccttcgttcgaaacgggtatatcttcgcataaaatctagacagaagcattctcagaaaatactttgtgatgattgagtttaaatcacagagctgaccattcctttggatggagcaggtttgagacacactttttgtagaatctacaagtggatatttggacctctctgaggatttcgttggaaacgggataactgcacctaactaaacggaagcattctcagaaactgctttgtgatgattgcattcacctcacagagttgaacattcctattgatagagcagtttggaaacactcttgttgtggaatgtgcaagtggagatttggagcgctttgaggcctatggtagtaaagggaatagcttcatagaaaaactagacagatgcattctcaggaaccttttggtgatgtttgtattcaactcccagagttgaactttcctttggaaagagcagctatgaaacactctttttctagaatctgcaagtggacgtttggagggctttgtggtttgtggtggaaaaggaaatatcttcacctaaatactagatagaagcattctcagaagcttctctgtgatgactgcattcaactcacggagttgaacactccttttgagagcgcagttttgaaactctctttctgtggcatctgcaaggggacatgtagacctctttgaagatttcgttggaaacggaatcatcttcacataaaaactatacagaagcagtctcagaatcttctttgtgatgtttgcattcaaatcccagagttgaactttcctttcaaagttcacgtttgaaacactctttttgcaggatctacaagtggatatttggaccactctgtgtccttcgttcgaaacgggtatatcttcacacgacatctagacagaagctttctcagaaaattctttgggatgattgagtggaactcacagagctgaacattccttgcgatgtagcagtttagaaacacactttctgcagaatctgcaagtgcatatttggacctctctgaggaattcgttggaaacgggataatttcagctgactaaacagaagcattctcagaaccttcttcgtgatgtctacattcaacgcacagtgtggaacctttctttgatagttcaggtttgaaacactctttttgtagaaactgcaaggggataattgcacttctttgaggcctaccgtagtaaaggaaataacttcctatagaaagaagacagaagcattctcagaaccctcttcgtgatgtttgcattccactcacggtgctgaacctttctttgatagttcagctttgaaatactcttcttgtagaaactgcaagtggatatttggtcctctctgaggatttcgttggaaacgggataaaccgcacagaactaaacagaagcattctcagagccctcttcgtgatgtttgcattcaactcacagtgctgaacctttctttgatagtgcagctttgaaacactctttttgtagaaactgcaagtggatatttggtcctctctgaggatttcgttggaaacgggataaaccgcacagaactaaaacagaagcattcacagaaaactcttggtgacgactgagtttaactcacagagctgaacattcctttggatggagcagtttcgaaacacactatttgtagaatctgcaagtggatatttgggcctctctgaggatttcgttggaaacgggataaaacgcacagaactaaaacagaagcattctcagaaactactttgtgatgattgcattcaagtcacagagttgaacattccctttgacagagcagtttggaaactctctttgtgtagaatctgcaagtggagatatggaccgctttgaggcctatggtagtaaaggaaatagcttcatataaaagctagacagtagcattctcagaaacttctttgtgatgcttgcattcaactcacagagttgaactttcctttcgagagagaagctttgaaacactctttttccagaatgtgcaagtggacattttgggagctttgaggcctgtggtggaaaaggaattatcttcccgtaaaagctagatagaagcattgtcagaaacttctttgtgatgattgcattcaactcacagagttgaaggttccttttcaaacagcagtttccaatcactctttctgtggaatctgcaagtggatatttgggcctctctgaggatttcgttggaaacgggataaaacgcacagaactaaaacagaagcattctcagaaacttctctgtgatgtttgtgttcaactcccagagtttcacgttgcttttcatagagtagttctgaaacatgcttttcgtagtgtctgcaagtggacatttggagcgctttcaggcctgtggtggaaaacgaattatggtcacataaaaactggagagaagccttctcagaaacttctctgtgatgattgcattcaactcacagagttgaaccctcctatggatagagcagtgttgaaactctctttttgtggaatctgcaagtggatatgtggacctctccgaagatgtctttggaaacgggaatatcttcacataaaaactaaacagaagcattctcagaaacttcttggtgatgtttgcattcaaatcccagagttgaaccttcctttgatagttcaggtttgaaacactctttctgtaggatctgcaagtggctatttggacaactctgtggccttcgttcgaaacgggtatatcttcgcataaaatctagacaaaagcattctcagaaaatactttgtgatgattgagtttaaatcacagagctgaccattcctttggatggagcaggtttgagacacactttttgtagaatctacaagtggatatttggacctctctgaggatttcgttggaaacgggataactgcacctaactaaacggaagcattctcagaaactgctttgtgatgattgcattcacctcacagagttgaacattcctattgatagagcagtttggaaacactcttgttgtggaatgtgcaagtggagatttggagcgctttgaggcctatggtagtaaagggaatagcttcatagaaaaactagacagatgcattctcaggaactttttggtgatgtttgtattcaactcccagagttgaactttcctttggaaagagcagctatgaaacactctttttctagaatctgcaagtggacgtttggagggctttgtggtttgtggtggaaaaggaaatatcttcacctaaatactagatagaagcattctcagaagcttctctgtgatgactgcattcaactcacggagttgaacactccttttgagagcgcagttttgaaactctctttctgtggcatccgcaaggggacatgtggacctctttgaagatttcgttggaaacggaatcatcttcacataaaaactatacagaagcagtctcagaatcttctttgtgatgtttgcattcaaatcccagagttgaactttcctttcaaagttcacgtttgaaacactctttttgcaggatctacaagtggatatttggaccactctgtgtccttcgttcgaaacgggtatatcttcacaggacatctagacagaagctttctcagaaaattctttgggatgattgagtggaactcacagagctgaacattccttgcgatgtagcagtttagaaacacactttctgcagaatctgcaagtgcatatttggacctctctgaggaattcgttggaaacgggataatttcagctgactaaacagaagcattctcagaaccttcttcgtgatgtctgcattcaactcacagtgtggaacctttctttgatagttcaggtttgaaacactctttttgtagaaactgcaaggggataattgcacttctttgaggcctaccgtagtaaaggaaataacttcctatagaaagaagacagaagcattctcagaaccctcttcgtgatgtttgcattcaactcacagtgctgaacctttctttgatagttcagctttgaaacactcttcttgtagaaactgcaagtggatatttggtcctctctgaggatttcgttggaaacgggataaaccgcacagaactaaacagaagaattctcagagccctcttcgtgatgtttgcattcaactcacagtgctgaacctttctttgatagtgcagctttgaaacactctttttgtagaaactgcaagtggatgtttggtcctctctgaggatttcgttggaaacgggataaaccgcacagaactaaaacagaagcattgtcagaaacttctttgtgatgattgcattcaactcacagagttgaaggttccttttcaaacagcagtttgcaatcactctttctgtggaatctgcaagtggatatttgggcctctctgaggatttcgttggaaacgggataaaacgcacagaactaaaacagaagcattctcagaaacttctctgtgatgtttgtgttcaactcccagagtttcacgttgcttttcatagagtagttctgaaacatgcttttcgtagtgtctgcaagtggacatttggagcgctttcaggcctgtggtggaaaacgaattatggtcacataaaaactggagagaagccttctcagaaacttctctgtgatgattgcattcaactcacagagttgaaccctcctatggatagagcagtgttgaaactctctttttgtggaatctgcaagtggatatgtggacctctccgaagatgtctttggaaacgggaatatcttcacataaaaactaaacagaagcattctcagaaacttcttggtgatgtttgcattcaaatcccagagttgaaccttcctttgatagttcaggtttgaaacactctttctgtaggatctgcaagtggctatttggaccactctgtggccttcgttcgaaacgggtatatcttcgcataaaatctagacagaagcattctcagaaaatactttgtgatgattgagtttaaatcacagagctgaccattcctttggatggagcaggtttgagacacactttttgtagaatctacaagtggatatttggacctctctgaggatttcgttggaaacgggataactgcacctaactaaacggaagcattctcagaaactgctttgtgatgattgcattcacctcacagagttgaacattcctattgatagagcagtttggaaacactcttgttgtggaatgtgcaagtggagatttggagcgctttgaggcctatggtagtaaagggaatagcttcatagaaaaactagacagatgcattctcaggaaccttttggtgatgtttgtattcaactcccagagttgaactttcctttggaaagagcagctatgaaacactctttttctagaatctgcaagtggacgtttggagggctttgtggtttgtggtggaaaaggaaatatcttcacctaaatactagatagaagcattctcagaagcttctctgtgatgactgcattcaactcacggagttgaacactccttttgagagcgcagttttgaaactctctttctgtggcatctgcaaggggacatgtagacctctttgaagatttcgttggaaacggaatcatcttcacataaaaactatacagaagcagtctcagaatcttctttgtgatgtttgcattcaaatcccagagttgaactttcctttcaaagttcacgtttgaaacactctttttgcaggatctacaagtggatatttggaccactctgtgtccttcgttcgaaacgggtatatcttcacacgacatctagacagaagctttctcagaaaattctttgggatgattgagtggaactcacagagctgaacattccttgcgatgtagcagtttagaaacacactttctgcagaatctgcaagtgcatatttggacctctctgaggaattcgttggaaacgggataatttcagctgactaaacagaagcattctcagaaccttcttcgtgatgtctgcattcaactcacagtgtggaacctttctttgatagttcaggtttgaaacactctttttgtagaaactgcaaggggataattgcacttctttgaggcctaccgtagtaaaggaaataacttcctatagaaagaagacagaagcattctcagaaccctcttcgtgatgtttgcattcaactcacagtgctgaacctttctttgatagttcagctttgaaacactcttcttgtagaaactgcaagtggatatttggtcctctctgaggacttcgttggaaacgggataaaccgcacagaactaaacagaagcattctcagaaccttcttcgtgatgtttgcattcaactcacagtgttgaacctttctttgatagttcaggtttgaaacggtctttctgtagaaactgcaagtagatatttggacctctctgaggatttcgttggaaacgggataaaccgcacagaactaaaacagaagcattcacagaaaactcttggtgacgactgagtttaactcacagagctgaacattcctttggatggagcagtttcgaaacacactatttgtagaatgtgcaagtggatatttggacctctctgaggatttcgttggaaacgggataaaccgcacagaactaaacagaagcattctcagaaactactttgtgatgattgcattcaagtcacagagttgaacattccctttgacagagcagtttggaaactctctttgtgtagaatctgcaagtggagatatggaccgctttgaggcctatggtagtaaaggaaatagcttcatataaaagctagacagtagcattctcagaaacttctttgtgatgcttgcattcaactcacagagttgaactttcctttcgagagagaagctttgaaacactctttttccagaatctgcaagtggacatttggagggctttgaggcctgtggtggaaaaggaattaacttcccgtaaaagctagatagaagcattgtcagaaacttctttgtgatgattgcattcaactcaaagagatgaaggttcctttacaaacagcagtttccaaacactctttctgtggaatctgcaagtggatatttggacctctttgaagatttcgttggaaacgggagaatcttcacagaaaagctaaacagaagcattctcagaaacttctctgtgatgtttgtgttcaactcccagagtttcacattgcttttcatagagtagttctgaaacatgcttttcgtagtgtctgcaagtggacatttggagcgctttcaggcctgtggtggaaaacgaattatggtcccataaaaactggagagaagccttctcagaaacttctctgtgatgattgcattcaactcacagatttgaaccctcctatggatagagcattgttgaaactctctttttgtggaatctgcaagtggatatgtggacctctccgaagatgtctttggaaacgggaatatcttcacataaaaactaaacagaagcattctcagaatcttcttggtgatgtttgcattcaaatcccagagttgaaccttcctgtgatagttcaggtttgaaacactctttttgtaggatctgcaagtggatatttggaccactctgtggccttcgttcgaaacgggtacatcttcacataaaatctagacagaagcattctcagaaaatactttgtgatgattgagtttaactcacagagctgaacattcctttggatggagcaggtttgagacacactttttgtagaatctacaagtggatatttggacctctctgaggatttcgttggaaacgcgataactgcacctaactaaacggaagcattctcagaaactactttgtgatgattgcattcacctcacagagttgaacattcctattgatagagcagtttggaaacactcttgttgtggaatgtgcaagtggagatttggagcgctttgaggcctatggtagtaaagggaatagcttcatagaaaaactagacagatgcattctcaggaactttttggtgatgtttgtattcaactcccagagttgaactttcctttggaaagagcagctatgaaacactctttttctagaatctgcaagtggacgtttggagggctttgtggtttgtggtggaaaaggaaatatcttcacctaaatactagatagaagcattctcagaagcttctctgtgatgactgcattcaactcacggagttgaacactccttttgagagcgcagttttgaaactctctttctgtggcatctgcaaggggacatgtagacctctttgaagatttcgttggaaacggaatcatcttcacataaaaactatacagaagcagtctcagaatcttctttgtgatgtttgcattcaaatcccagagttgaactttcctttcaaagttcacgtttgaaacactctttttgcaggatctacaagtggatatttggaccactctgtgtccttcgttcgaaacgggtataacttcacacgacatctagacagaagctttctcagaaaattctttgggatgattcagttgaactcacagagctgaacattccttgtgatgtagcagtttagaaacacactttctgcagaatctgcaagtgcatatttggacctctctgaggaattcgttggaaacgggataatttcagctgactaaacagaagcattctcagaaccttcttcgtgatgtctgcattcaactcacagtgtggaacctttctttgatagttcaggtttgaaacactctttttgtagaaactgcaaggggataattgcacttctttgaggcctaccgtagtaaaggaaataacttcctataaaaagaagacagaagcattctcagaaccttcttcgtgataattgcattcaactcacactgctgaacctttctttgatagttcagctttgaaacactctttttgtagaaactgcaagtggatatttggtcctctctgaggatttcgttggaaacgggataaaccgcacagaactaaacagaagcattcacagaaaacgcttggtgacgactgagtttaactcacagagctgaacattcctttggatggagcagtttcgaaacacactatttgtagaatctgcaagtggatatttgggcctctctgaggatttcgttggaatcgggataaaccgcacagaactaaaacagaagcattctgagaaactactttgtgatgattgcattcaagtcacagagctgaacattccctttgacagagcagtttggaaactctctttgtgtagaatctgcaagtggagatatggaatgctttgaggactatggtagtaaaggaaatagctccatataaaagctagacagtagcattctcagaaacttctttgtgatgcttgcattcaactcacagagttgaactttcctttcgagagagaagctttgaaacactctttttccagaatctgcaagtggacatttggagggctttgaggcctgtggtggaaaaggaattatcttcccgtaaaagctagatagaagcattgtcagaaacttctttgtgatgattgcattcaactcacagagatgaaggttcctttacaaacagcagtttccaaacactctttctgtggaatctgcaagtggatatttggacctctttgaagatttcgttggaaacgggagaatcttcacagaaaagctaaacagaagcattctcagaaacttctctgtgatgtttgtgttcaactcccagagtttcacattgcttttcatagagtagttctgaaacatgcttttcgtagtgtctgcaagtggacatttggagcgctttcaggcctgtggtggaaaacgaattatggtcccataaaaactggagagaagccttctcagaaacttctctgtgatgattgcattcaactcacagatttgaaccctcctatggatagagcattgttgaaactctctttttgtggaatctgcaagtggatatgtggacctctccgaagatgtctttggaaacgggaatatcttcacataaaaactaaacagaagcattctcagaaacttcttggtgatgtttgcattccaatcccagagttgaaccttcctgtgatagttcaggtttgaaacactctttttgtaggatctgcaagtggatatttggaccactctgtggccttcgttcgaaacgggtacatcttcacataaaatctagacagaagcattctcagaaaatactttgtgatgattgagtttaactcacagagctgaacattcctttggatggagcaggtttgagacacactttttgtagaatctacaagtggatatttggacctctctgaggatttcgttggaaacgcgataactgcacctaactaaacggaagcattctcagaaactgctttgtgatgattgcattcacctcacagagttgaacattcctattgataaagcagtttggaaacactcttgttgtggaatgtgcaagtggagatttggagcgctttgaggcctatggtagtaaaggggatagcttcatagaaaaactagacagatgcattctcaggaactttttggtgatgtttgtattcaactcgcagagttgaactttcctttggaaagagcagctatgaaacactctttttctagaatctgcaagtggacgtttggagggctttgtggtttgtggtggaaaaggaaatatcttcacctaaatactagatagaagcattctcagaagcttctctgtgatgactgcattcaactcacggagttgaacactccttttgagagcgcagttttgaaactctctttctgtggcatctgcaaggggacatgtagacctctttgaagatttcgttggaaacggaatcatcttcacataaaaactatacagaagcagtctcagaatcttctttgtgatgtttgcattcaaatcccagagttgaactttcctttcaaagttcacgtttgaaacactctttttgcagggtctacaagtggatatttggaccactctgtgtccttcgttcgaaacgggtatatcttcacatgacatctagacagaagctttctcagaaaattctttgggatgattgagtggaactcacagagctgaacattccttgcgatgtagcagtttagaaacacactttctgcagaatctgcaagtgcatatttggacctctctgaggaattcgttggaaacgggataatttcagctgactaaacagaagcattctcagaaccttcttcgtgatgtctgcattcaactcacagtgtggaacctttctttgatagttcaggtttgaaacactctttttgtagaaactgcaaggggataattgcacttctttgaggcctaccgtagtaaaggaaataacttcctatagaaagaagacagaagcattctcagaaccctcttcgtgatgtttgcattcaactcacagtgctgaacctttctttgatagttcagctttgaaacactcttcttgtagaaactgcaagtggatatttggtcctctctgaggatttcgttggaaaagggataaaccgcacagaactaaacagaagcattctcagaaccttcttcgtgatgtttgcattcaactcacagtgttgaacctttctttgatagttcaggtttgaaacggtctttctgtagaaactgcaagtagatatttggacctctctgaggatttcgttggaaacgggataacccgcacagaactaaaacagaagcattcacagaaaactcttggtgacgactgagtttaactcacagagctgaacattcctttggatggagcagtttcgaaacacactatttgtagaatgtgcaagtggatatttgggcctctctgaggatttcgttggaaacgggataaaccgcacagaactaaacagaagcattctcagaaactactttgtgatgattgcattcaagtcacagagttgaacattccctttgacagagcagtttggaaactctctttgtgtagaatctgcaagtggagatatggaccgctttgaggcctatggtagtaaaggaaatagcttcatataaaagctagacagtagcattctcagaaacttctttgtgatgcttgcattcaactcacagagttgaactttcctttcgagagagaagctttgaaacactctttttccagaatctgcaagtggacatttggagggctttgaggcgtgtggtggaaaaggaattaacttcccgtaaaagctagatagaagcattgtcagaaacttctttgtcacgattgcattcaactcacagagatgaaggttcctttacaaacagcagtttccaaacactctttctgtggaatctgcaagtggatatttggacctctttgaagatttcgttggaaacgggagaatcttcacagaaaagctaaacagaagcatcctcagaaacttctctgtgatgtttgtgttcaactcccagagtttcacattgcttttcatagagtagttctgaaacatgcttttcgtagtgtctgcaagtggacatttggagcgctttcaggcctgtggtggaaaacgaattatggtcccataaaaactggagggaagccttctcagaaacttctctgtgatgattgcattcaagtcacagatttgaaccctcctatggatagagcattgttgaaactctctttttgtggaatctgcaagtggatatgtggacctctccgaagatgtctttggaaacgggaatatcttcgcataaaaactaaacagaagcattctcagaaacttcttggtgatgtttgcattccaatcccagagttgaaccttcctgtgatagttcaggtttgaaacactctttttgtaggatctgcaagtggatatttggaccactctgtggccttcgttcgaaacgggtacatcttcacataaaatctagacagaagcattctcagaaaatactttgtgatgattgagtttaactcacagagctgaacattcctttggatggagcaggtttgagacacactttttgtagaatctacaagtggatatttggacctctctgaggatttcgttggaaacgcgataactgcacctaactaaacggaagcattctcagaaactgctttgtgatgattgcattcacctcacagagttgaacattcctattgatagagcagtttggaaacactgttgttgtggaatgtgcaagtggagatttggagcgctttgaggcctatggtagtaaagggaatagcttcatagaaaaactagacagatgcattctcaggaactttttggtgatgtttgtattcaactcccagagttgaactttcctttggaaagagcagctatgaaacactctttttctagaatctgcaagtggacgtttggagggctttgtggtttgtggtggaaaaggaaatatcttcacctaaatactagatagaagcattctcagaagcttctctgtgatgactgcattcaactcacggagttgaacactccttttgagagcgcagttttgaaactctctttctgtggcatctgcaaggggacatgtagacctctttgaagatttcgttggaaacggaatcatcttcacataaaaactatacagaagcagtctcagaatcttctttgtgatgtttgcattcaaatcccagagttgaactttcctttcaaagttcacgtttgaaacactctttttgcaggatctacaagtggatatttggaccactctgtgtccttcgttcgaaacgggtatatcttcacacgacatctagacagaagctttctcagaaaattctttgggatgattgagtggaactcacagagctgaacattccttgcgatgtagcagtttagacacacactttctgcagaatctgcaagtgcatatgtggacctctctgaggaattcgttggaaacgggataatttcagctgactaaacagaagcattctcagaaccttgttcgtgatgtctgcattcaattcacagtgtggaacctttctttgatagttcaggtttgaaacactctttttgtagaaactgcaaggggataattgcacttctttgaggcctaccgtagtaaaggaaataacttcctatagaaagaagacagaagcattctcagaaccctcttcgtgatgtttgcattcaactcacagtgctgaacctttctttgatagttcagctttgaaacactcttcttgtagaaactgcaagtggatatttggtcctctctgaggatttcgttggaaacgggataaaccgcacagaactaaacagaagaattctcagagccctcttcgtgatgtttgcattcaactcacagtgctgaacctttctttgatagtgcagctttgaaacactctttttgtagaaactgcaagtggatgtttggtcctctctgaggatttcgttggaaacgggataaaccgcacagaactaaaacagaagcattgtcagaaacttctttgtgatgattgcattcaactcacagagttgaaggttccttttcaaacagcagtttccaatcactctttctgtggaatctgcaagtggatatttgggcctctctgaggatttcattggaaacgggataaaacgcacagaactaaaacagaagcattctcagaaacttctctgtgatgtttgtgttcaactcccagagtttcacattgcttttcatagagtagttctgaaacatgcttttcgtagtgtctacaagtggacatttggagcgctttcaggcctgtggtggaaaacgaattatggtcacataaaaactggagagaagccttctcagaaacttctctgtgatgattgcattcaactcacagagttgaaccctcctatgtatagagcagtgttgaaactctctttttgtggaatctgcaagtggatatgtggacctctccgaagatgtctttggaaaagggaatatcttcacataaaaactaaacagaagcattctcagaaacttcttggtgatgtttgcattcaaatcccagagttgaaccttcctttgatagttcaggtttgaaacactctttttgtaggatctgcaagtggctatttggaccactctgtggccttcgttcgaaacgggtatatcttcgcataaaatctagacagaagcattctcagaaaatactttgtgatgattgagtttaaatcacagagctgaacattcctttggatggagcaggtttgagacacactttttgtagaatctacaagtggatatttggacctctcggaggatttcgttggaaacgggataactgcacctaactaaacggaagcattctcagaaactgctttgtgatgattgcattcacctcacagagttgaacattcctattgatagagcagtttggaaacactcttgttgtggaatgtgcaagtggagatttggagcgctttgaggcctatggtagtaaagggaatagcttcatagaaaaactagacagatgcattctcaggaactttttggtgatgtttgtattcaactcccagagttgaactttcctttggaaagagcagctatgaaacactctttttctagaatctgcaagtggacgtttggagggctttgtggtttgtggtggaaaaggaaatatcttcacctaaatactagatagaagcattctcagaagcttctctgtgatgactgcattcaactcacggagttgaacactccttttgagagcgcagttttgaaactctctttctgtggcatctgcaaggggacatgtagacctctttgaagatttcgttggaaacggaatcatcttcacataaaaactatacagaagcagtctcagaatcttctttgtgatgtttgcattcaaatcccagagttgaactttcctttcaaagttcacgtttgaaacactctttttgcaggatctacaagtggatatttggaccactctgtgtccttcgttcgaaacgggtatatcttcacacgacatctagacagaagctttctcagaaaattctttgggatgattgagtggaacccacagagctgaacattccttgcgatgtagcagtttagaaacacactttctgcagaatctgcaagtgcatatttggacctctctgaggaattcgttggaaacgggataatttcagctgactaaacagaagcattctcagaaccttcttcgtgatgtctgcattcaactcacagtgtggaacctttctttgatagttcaggtttgaaacactctttttgtagaaactgcaaggggataattgcacttctttgaggcctaccgtagtaaaggaaataacttcctatagaaagaagacagaagcattctcagaaccctcttcgtgatgtttgcattcaactcacagtgctgaagctttctttgatagttcagctttgaaacactcttcttgtagaaactgcaagtggatatttggtcctctctgaggatttcgttggaaacgggataaaccgcacagaactaaacagaagcattctcagagccctcttcgtgatgtttgcattcaactcacagttctgaacctttctttgatagtgcagctttgaaacactctttttgtagaaactgcaagtggatgttttgtcctccctgaggatttcgttggaaacgggataaaccgcacagaactaaaacagaagcattctcagaaccttcttcgtgatgtttgcattcaactcacagtgttgaacctttctttgatagttcaggtttgaaacggtctttctgtagaaactgcaagtagatatttggacctctctgaggatttcgttggaaacgggataacccgcacagaactaaaacagaagcattcacagaaaactcttggtgacgactgagtttaactcacagagctgaacattcctttggatggagcagtttcgaaacacactatttgtagaatgtgcaagtggatatttaggcctctctgaggatttcgttggaaacgggataaaccgcacagaactaaacagaagcattctcagaaactactttgtgatgattgcattcaagtcacagagttgaacattccctttgacagagcagtttggaaactctctttgtgtagaatctgcaagtggagatatggaccgctttgaggcctatggtagtaaaggaaatagcttcatataaaagctagacagtagcattctcagaaacttctttgtgatgcttgcattcaactcacagagttgaactttcctttcgagagagaagctttgaaacactctttttccagaatctgcaagtggacatttggagggctttgaggcctgtggtggaaaaggaattatcttcccgtaaaagctagatagaagcattgtcagaaactactttgtgatgattgcattcaactcacagagttgaaggttccttttcaaacagcagtttccaatcactctttctgtggaatctgcaagtggatatttggacctctttgaagatttcgttggaaacgggagaatcttcacagaaaagctaaacagaagcattctcagaaacttctctgtgatgtttgtgttcaactcccagaatttcacattgcttttcatagagtagttctgaaacatgcttttcgtagtgtctgcaagtggacatttggagcgctttcaggcctgtggtggaaaacgaattatggtcacataaaaactggagagaagccttctcagaaacttctctgtgatgattgcattcaactcacagagttgaaccctcctatggatagagcagtgttgaaactctctttttgtggaatctgcaagtggatatgtggacctctccgaagatgtctttggaaacgggaatatcttcacataaaaactaaacagaagcattctcagaaacttcttggtgatgtttgcattcaaatcccagagttgaaccttcctttgatagttcaggtttgaaacactctttctgtaggatctgcaagtggctatttggaccactctgtggccttcgttcgaaacgggtatatcttcgcataaaatctagacagaagcattctcagaaaatactttgtgatgattgagtttaaatcacagagctgaccattcctttggatggagcaggtttgagacacactttttgtagaatctacaagtggatatttggacctctctgaggatttcgttggaaacgggataactgcacctaactaaacggaagcattctcagaaactgctttgtgatgattgcattcacctcacagagttgaacattcctattgatagagcagtttggaaacactcttgttgtggaatgtgcaagtggagatttggagcgctttgaggcctgtggtagtaaagggaatagcttcatagaaaaactagacagatgcattctcaggaactttttggtgatgtttgtattcaactcccagagttgaactttcctttggaaagagcagctatgaaacactctttttctagaatctgcaagtggacgtttggagggctttgtggtttgtggtggaaaaggaaatatcttcacctaaatactagacagaagcattctcagaagcttctctgtgatgactgcattcaactcacggagttgaacactccttttgagagcgcagttttgaaactctctttctgtggcatctgcaaggggacatgtagacctctttgaagatttcgttggaaacggaatcatcttcacataaaaactatacagaagcagtctcagaatcttctttgtgatgtttgcattcaaatcccagagttgaactttcctttcaaagttcacgtttgaaacactctttttgcaggatctacaagtggatatttggaccactctgtgtccttcgttcgaaacgggtatatcttcacacgacatctagacagaagctttctcagaaaattctttgggatgattgagtggaactcacagagctgaacattccttgcgatgtagcagtttagaaacacactttctgcagaatctgcaagtgcatatttggacctctctgaggaattcgttggaaacgggataatttcagctgactaaacagaagcattctcagaaccttcttcgtgatgtctgcattcaactcacagtgtggaacctttctttgatagttcaggtttgaaacactctttttgtagaaactgcaaggggataattgcacttctttgaggcctaccgtagtaaaggaaataacttcctatagaaagaagacagaagcattctcagaaccctcttcgtgatgtttgcattcaactcacagtgctgaacctttctttgatagttcagctttgaaacactcttcttgtagaaactgcaagtggatatttggtcctctctgaggatttcgttggaaacgggataaaccgcacagaactaaacagaagaattctcagagccctcatcgtgatgtttgcattcaactcacagtgctgaacctttctttgatagtgcagctttgaaacactctttttgtagaaactgcaagtggatgtttggtcctctctgaggatttcgttggaaacgggataaaccgcacagaactaaaacagaagcattgtcagaaacttctttgtgatgattgcattcaactcacagagttgaaggttccttttcaaacagcagtttccaatcactctttctgtggaatctgcaagtggatatttgggcctctctgaggatttcgttggaaacgggataaaacgcacagaactaaaacagaagcattctcagaaacttctctgtgatgtttgtgttcaactcccagagtttcacgttgcttttcatagagtagttctgaaacatgcttttcgtagtgtctgcaagtggacatttggagcgctttcaggcctgtggtggaaaacgaattatggtcacataaaaactggagagaagccttctcagaaacttctctgtgatgattgcattcaactcacagagttgaaccctcctatggatagagcagtgttgaaactctctttttgtggaatctgcaagtggatatgtggacctctccgaagatgtctttggaaacgggaatatcttcacataaaaactaaacagaagcattctcagaaacttcttggtgatgtttgcattcaaatcccagagttgaaccttcctttgatagttcaggtttgaaacactctttctgtaggatctgcaagtggctatttggaccactctgtggccttcgttcgaaacgggtatatcttcgcataaaatctagacagaagcattctcagaaaatactttgtgatgattgagtttaaatcacagagctgaccattcctttggatggagcaggtttgagacacactttttgtagaatctacaagtggatatttggacctctctgaggatttcgttggaaacgggataactgcacctaactaaacggaagcattctcagaaactgctttgtgatggttgcattcacctcacagagttgaacattcctattgatagagcagtttggaaacactcttgttgtggaatgtgcaagtggagatttggagcgctttgaggcctatggtagtaaagggaatagcttcatagaaaaactagacagatgcattctcaggaactttttggtgatgtttgtattcaactcccagagttgaactttcctttggaaagagcagctatgaaacactctttttctagaatctgcaagtggacgtttggagggctttgtggtttgtggtggaaaaggaaatatcttcacctaaatactagatagaagcattctcagaagcttctctgtgatgactgcattcaactcacggagttgaacactccttttgagagcgcagttttgaaactctctttctgtggcatctgcaaggggacatgtagacctctttgaagatttcgttggaaacggaatcatcttcacataaaaactatacagaagcagtctcagaatcttctttgtgatgtttgcattcaaatcccagagttgaactttcctttcaaagttcacgtttgaaacactctttttgcaggatctacaagtggatatttggaccactctgtgtccttcgttcgaaacgggtatatcttcacacgacatctagacagaagctttctcagaaaattctttgggatgattgagtggaactcacagagctgaacattccttgcgatgtagcagtttagaaacacactttctgcagaatctgcaagtgcatatttggacctctctgaggaattcgttggaaacgggataatttcagctgactaaacagaagcattctcagaaccttcttcgtgatgtctgcattcaactcacagtgtggaacctttctttgatagttcaggtttgaaacactctttttgtagaaactgcaaggggataattgcacttctttgaggcctaccgtagtaaaggaaataacttcctatagaaagaagacagaagcattctcagaaccctcttcgtgatgtttgcattcaactcacagtgctgaacctttctttgatagttcagctttgaaacactcttcttgtagaaactgcaagtggatatttggtcctctctgaggatttcgttggaaacgggataaaccgcagagaactaaacagaagcgttctcagaaccctcttcgtgatgtttgcattcaactcacagtgctgaacctttctttgatagtgcagctttgaaacactctttttgtagaaactgcaagtggatatttggtcctctctgaggatttcgttggaaacgggataaaccgcacggaactaaaacggaagcattctcagaaccttcttcgtgatgtttgcattcaactcacagtgttgaacctttctttgatagttcaggtttgaaacggtctttctgtagaaactgcaagtagatatttggacctctctgaggatttcgttggaaacgggataaaccacacagaattaaaacagaagcattcacagaaaactcttggtgacgactgagtttaactcacagagctgaacattcctttggatggagcagtttcgaaacacactatttgtagaatgtgcaagtggatatgtgggcctctctgaggatttcgttggaaacgggataaaccgcacagaactaaacagaagcattctcagaaactactttgtgatgattgcattcaagtcacagagttgaacattccctttgacagagcagtttggaaactctctttgtgtagaatctgcaagtggagatatggaccgctttgaggcctatggtagtaaaggaaatagcttcatataaaagctagacagtagcattctcagaaacttctttgtgatgcttgcattcaactcacagagttgaactttcctttcgagagagaagctttgaaacactctttttccagaatctgcaagtggacatttggagggctttgaggcctgtggtggaaaaggaattatcttcccgtaaaagctagatagaagcattgtcagaaacttctttgtgatgattgcatacaagtcacagagttgaaggttccttttcaaagagcagtttccaatcactctttctgtggaatctgcaagtggatatttggacctctttgaagatttcgttggaaacgggagaatcttcacaaaaaagataaacagaagcattctcagaaacttctctgtgatgtttgtgttcaactcccagagtttcacattgcttctcatagagtagttctgaaacatgcttttcgtagtgtctgcaagtggacatttggagcgctttcaggcctgtggtggaaaacgaattatggtcacataaaaactggagagaagccttctcaaaaacttctctgtgatgattgcattcaactcacagagttgaaccctcctatggatagagcagtgttgaaactctctttttgtggaatctgcaagcggatatgtggacctctccgaagatgtctttggaaacgggaatatcttcacataaaaactaaacagaagcattctcaaaacttcttggtgatgtttgcattcaaatcccagagttgaaccttcctttgatagttcaggtttgaaaaactctttttgtaggatctgcaagtggatatttggaccactctgtggccttcgttcgaaacgggtacatcttcgcataaaatctagacagaagcattctcagaaaatactttgtgatgattgagttgaactcacagagctgaacattcctttggatggagcaggtttgagacacactttttgtagaatctacaagtggatatttggacctctctgaggatttcgttggaaacgggataactgcacctaactaaacggaagcattcccagaaactgctttgtgatgattgcattcacctcacagagttgaacattcctattgatagagcagtttggaaacactcttgttgtggaatgtgcaagtggagatttggagcgctttgaggcctatggtcgtaaagggaatagcttcatagaaaaactagacagatgcattctcaggaactttttggtgatgtttgtattcaactcccagagttgaactttcctttggaaagagcagctatgaaacactctttttctagaatctgcaagtggacgtttggagggctttgtggtttgtggtggaaaaggaaatatcttcacctaaatactagatagaagcattctcagaagcttctctgtgatgactgcattcaactcacggagttgaacactccttttgagagcgcagttttgaaactctccttctgtggcatccgcaaggggacatgtggacctctttgaagatttcgttggaaacggaatcatcttcacataaaaactatacagaagcagtctcagaatcttctttgtgatgtttgcattcaaatcccagagttgaactttcctttcaaagttcacgtttgaaacactctttttgcaggatctacaagtggatatttggaccactctgtgtccttcgttcgaaacgggtatatcttcacatgacatctagacagaagctttctcagaaaattctttgggatgattgagtggaactcacagagctgaacattccttgcgatgtagcagtttagaaacacactttctgcagaatctgcaagtgcatatttggacctctctgaggaattcgttggaaacgggataatttcagctgactaaacagaagcattctcagaaccttcttcgtgatgtctgcattcaactcacagtgtggaacctttctttgatagttcaggtttgaaacactctttttgtagaaactgcaaggggataattgcacttctttgaggcctaccgtagtaaaggaaataacttcctatagaaagaagacagaagcattctcagaaccctcttcgtgatgtttgcattcaactcacagtgctgaacctttctttgatagttcagctttgaaacactcttcttgtagaaactgcaagtggatatttggtcctctctgaggatttcgttggaaacgggataaaccgcacagaactaaacagaagaattctcagagccctcttcgtgatgtttgcattcaactcacagtgctgaacctttctttgatagtgcagctttgaaacactctttttgtagaaactgcaagtggatgtttggtcctctctgaggatttcgttggaaacgggataaaccgcacagaactaaaacagaagcattgtcagaaacttctttgtgatgattgcattcaactcacagagttgaaggttccttttcaaacagcagtttccaatcactctttctgtggaatctgcaagtggatatttgggcctctctgaggatttcgttggaaacgggataaaacgcacagaactaaaacagaagcattctcagaaacttctctgtgatgtttgtgttcaactcccagagtttcacgttgcttttcatagagtagttctgaaacatgcttttcgtagtgtctgcaagtggacatttggagcgctttcaggcctgtggtggaaaacgaattatggtcacataaaaactggagagaagccttctcagaaacttctctgtgatgattgcattcaactcacagagttgaaccctcctatggatagagcagtgttgaaactctctttttgtggaatctgcaagtggatatgtggacctctccgaagatgtctttggaaacgggaatatcttcacataaaaactaaacagaagcattctcagaaacttcttggtgatgtttgcattcaaatcccagagttgaaccttcctttgatagttcaggtttgaaacactctttctgtaggatctgcaagtggctatttggaccactctgtggccttcgttcgaaacgggtatatcttcgcataaaatctagacagaagcattctcagaaaatactttgtgatgattgagtttaaatcacagagctgaccattcctttggatggagcaggtttgagacacactttttgtagaatctacaagtggatatttggacctctctgaggatttcgttggaaacgggataactgcacctaactaaacggaagcattctcagaaactgctttgtgatgattgcattcacctcacagagttgaacattcctattgatagagcagtttggaaacactcttgttgtggaatgtgcaagtggagatttggagcgctttgaggcctatggtagtaaagggaatagcttcatagaaaaactagacagatgcattctcaggaaccttttggtgatgtttgtattcaactcccagagttgaactttcctttggaaagagcagctatgaaacactctttttctagaatctgcaagtggacgtttggagggctttgtggtttgtggtggaaaaggaaatatcttcacctaaatactagatagaagcattctcagaagcttctctgtgatgactgcattcaactcacggagttgaacactccttttgagagcgcagttttgaaactctctttctgtggcatctgcaaggggacatgtagacctctttgaagatttcgttggaaacggaatcatcttcacataaaaactatacagaagcagtctcagaatcttctttgtgatgtttgcattcaaatcccagagttgaactttcctttcaaagttcacgtttgaaacactctttttgcaggatctacaagtggatatttggaccactctgtgtccttcgttcgaaacgggtatatcttcacacgacatctagacagaagctttctcagaaaattctttgggatgattgagtggaactcacagagctgaacattccttgcgatgtagcagtttagaaacacactttctgcagaatctgcaagtgcatatttggacctctctgaggaattcgttggaaacgggataatttcagctgactaaacagaagcattctcagaaccttcttcgtgatgtctgcattcaactcacagtgtggaacctttctttgatagttcaggtttgaaacactctttttgtagaaactgcaaggggataattgcacttctttgaggcctaccgtagtaaaggaaataacttcctatagaaagaagacagaagcattctcagaaccctcttcgtgatgtttgcattcaactcacagtgctgaacctttctttgatagttcagctttgaaacactcttcttgtagaaactgcaagtggatatttggtcctctctgaggatttcgttggaaacgggataaaccgcacagaactaaacagaagaattctcagagccctcttcgtgatgtttgcattcaactcacagtgctgaacctttctttgatagtgcagctttgaaacactctttttgtagaaactgcaagtggatgtttggtcctctctgaggatttcgttggaaacgggataaaccgcacagaactaaaacagaagcattgtcagaaacttctttgtgatgattgcattcaactcacagagttgaaggttccttttcaaacagcagtttccaatcactctttctgtggaatctgcaagtggatatttgggcctctctgaggatttcgttggaaacgggataaaacgcacagaactaaaacagaagcattctcagaaacttctctgtgatgtttgtgttcaactcccagagtttcacgttgcttttcatagagtagttctgaaacatgcttttcgtagtgtctgcaagtggacatttggagcgctttcaggcctgtggtggaaaacgaattatggtcacataaaaactggagagaagccttctcagaaacttctctgtgatgattgcattcaactcacagagttgaaccctcctatggatagagcagtgttgaaactctctttttgtggaatctgcaagtggatatgtggacctctccgaagatgtctttggaaacgggaatatcttcacataaaaactaaacagaagcattctcagaaacttcttggtgatgtttgcattcaaatcccagagttgaaccttcctttgatagttcaggtttgaaacactctttctgtaggatctgcaagtggctatttggaccactctgtggccttcgttcgaaacgggtatatcttcgcataaaatctagacagaagcattctcagaaaatactttgtgatgattgagtttaaatcacagagctgaccattcctttggatggagcaggtttgagacacactttttgtagaatctacaagtggatatttggacctctctgaggatttcgttggaaacgggataactgcacctaactaaacggaagcattctcagaaactgctttgtgatgattgcattcacctcacagagttgaacattcctattgatagagcagtttggaaacactcttgttgtggaatgtgcaagtggagatttggagcgctttgaggcctatggtagtaaagggaatagcttcatagaaaaactagacagatgcattctcaggaactttttggtgatgtttgtattcaactcccagagttgaactttcctttggaaagagcagctatgaaacactctttttctagaatctgcaagtggacgtttggagggctttgtggtttgtggtggaaaaggaaatatcttcacctaaatactagatagaagcattctcagaagcttctctgtgatgactgcattcaactcacggagttgaacactccttttgagagcgcagttttgaaactctctttctgtggcatccgcaaggggacatgtagacctctttgaagatttcgttggaaacggaatcatcttcacataaaaactatacagaagcagtctcagaatcttctttgtgatgtttgcattcaaatcccagagttgaactttcctttcaaagttcacgtttgaaacactctttttgcaggatctacaagtggatatttggaccactctgtgtccttcgttcgaaacgggtatatcttcacacgacatctagacagaagctttctcagaaaattctttgggatgattgagttgaactcacagagctgaacattccttgcgatgtagcagtttagaaacacactttctgcagaatctgcaagtgcatatttggacctctctgaggaattcgttggaaacgggataatttcagctgactaaacagaagcattctcagaaccttcttcgtgatgtctgcattcaactcacagtgtggaacctttctttgatagttcaggtttgaaacactctttttgtagaaactgcaaggggataattgcacttctttgaggcctaccgtcgtaaaggaaataacttcctatagaaagaagacagaagcattctcagaaccctcttcgtgatgtttgcattcaactcacagtgctgaacctttctttgatagttcagctttgaaacactcttcttgtagaaactgcaagtggatatttggtcctctctgaggatttcgttggaaacgggataaaccgcacagaactaaacagaagatttctcagagccctcttcgtgatgtttgcattcaactcacagtgctgaacctttctttgatagtgcagctttgaaacactctttttgtagaaactgcaagtggatatttggtcctctctgaggatttcgttggaaacgggataaaccgcacagaactaaaacagaaggattcacagaaaactcttggtgacgactgagtttaactcacagagctgaacattcctttggatggagcagtttcgaaacacactatttgtagaatctgcaagtggatatttgggcctctctgaggatttcgttggaaacgggataaaacgcacagaactaaaacagaagcattctcagaaactactttgtgatgattgcattcaagtcacagagttgaacattccctttgacagagcagtttggaaactctctttgtgtagaatctgcaagtggagatatggaccgctttgaggcctatggtagtaaaggaaataccttcatataaaagctagacagtagcattctcagaaacttctttgtgatgcttgcattcaactcacagagttgaactttcctttcgagagagaagctttgaaacactctttttccagaatgtgcaagtggacatttggggagctttgaggcctgtggtggaaaaggaattgtcttcccgtaaaagctagatagaagcattgtcagaaacttctttgtgatgattgcattcaactcacagagttgaaggttccttttcaaacagcagtttccaatcactctttctgtggaatctgcaagtggatatttcgacctctttgaagatttcgttggaaacgggagaatcttcacagaaaagctaaacagaagcattctcagaaacttctctgtgatgtttgtgttcaactcccagagtttcacgttgcttttcatagagtagtcctgaaacatgcttttcgtagtgtctgcaagtggacatttggagcgctttcaggcctgtggtggaaaacaaattatggtcacataaaaactggagagaagccttctcagaaacttctctgtgatgattgcattcaactcacagagttgaaccctcctatggatagagcagtgttgaaactctctttttgtggaatctgcaagtggatatgtggacctctccgaagatgtctttggaaacgggaatatcttcacataaaaactaaacagaagcattctcagaaacttcttggtgatgtttgcattcaaatcccagagttgaaccttcctttgatagttcaggtttgaaacactctttctgtaggatctgcaagtggctatttggaccactctgtggccttcgttcgaaacgggtatatcttcgcataaaatctagacagaagcattctcagaaaatactttgtgatgattgagtttaaatcacagagctgaccattcctttggatggagcaggtttgagacacactttttgtagaatctacaagtggatatttggacctctctgaggatttcgttggaaacgggataactgcacctaactaaacggaagcattctcagaaactgctttgtgatgattgcattcacctcacagagttgaacattcctattgatagagcagtttggaaacactcttgttgtggaatgtgcaagtggagatttggagcgctttgaggcctatggtagtaaagggaatagcttcatagaaaaactagacagatgcattctcaggaactttttggtgatgtttgtattcaactcccagagttgaactttcctttggaaagagcagctatgaaacactctttttctagaatctgcaagtgaacgtttggagggctttgtggtttgtggtggaaaaggaaatatcttcacctaaatactagatagaagcattctcagaagcttctctgtgatgactgcattcaactcacggagttgaacactccttttgagagcgcagttttgaaactctctttctgtggcatctgcaaggggacatgtagacctctttgaagatttcgttggaaacggaatcatcttcacataaaaactatacagaagcagtctcagaatcttctttgtgatgtttgcattcaaatcccagagttgaactttcctttcaaagttcacgtttgaaacactctttttgcaggatctacaagtggatatttggaccactctgtgtccttcgttcgaaacgggtatatcttcacacgacatctagacagaagctttctcagaaaattctttgggatgattgagtggaactcacagagctgaacattccttgcgatgtagcagtttagaaacacactttctgcagaatctgcaagtgcatatttggacctctctgaggaattcgttggaaacgggataatttcagctgactaaacagaagcattctcagaaccttcttcgtgatgtctgcattcaactcacagtgtggaacctttctttgatagttcaggtttgaaacactctttttgtagaaactgcaaggggataattgcacttcgttgaggcctaccgtagtaaaggaaataacttcctataaaaagaagacagaagcattctcagaaccctcttcgtgatgtttgcattcaactcacagtgctgaacctttctttgatagttcagctttgaaacactcttcttgtagaaactgcaaggggatatttggtcctctctgaggatttcgttggaaacgggataaaccgcacagaactaaacagaagaattctcagagccctcttcctggtgtttgcattcaactcacagtgctgaacctttctttgatagtgcagctttgaaacactctttttgtagaaactgcaagtggatatttggtcctctctgaagatttcgttggaaacgggataaaccgcacagaactaaaacagaagcattcacagaaaactcttggtgacgactgagtttaactcacagagctgaacattcctttggatggagcagtttcgaaacacactatttgtagaatctgcaagtggatatttgggcctctctgaggatttcgttggaaacgggataaaacgcacagaactaaaacagaagcattctcagaaactactttgtgatgattgcattcaagtcacagagttgaacattccctttgacagagcagtttggaaactctctttgtgtagaatctgcaagtggagatatggaccgctttgaggcctatggtagtaaaggaaatagcttcatataaaagctagacagtagcattctcagaaacttctttgtgatgcttgcattcaactcacagagttgaactttcctttcgagagagaagctttgaaacactctttttccagaatgtgcaagtggacatttggggagctttgaggcctgtggtggaaaaggaattatcttcccgtaaaagctagatagaagcattgtcagaaacttctttgtgatgattgcattcaactcacagagttgaaggttccttttcaaataccagtttccaatcactctttctgtggaatctgcaagtggatatttcgacctctttgaagatttcgttggaaacgggagaatcttcacagaaaagctaaacagaagcattctcagaaacttctctgtgatgtttgtgttcaactcccagagtttcacgttgcttttcatagagtagttctgaaacatgcttttcgtagtgtctgcaagtggacatttggagcgctttcaggcctgtggtggaaaacgaattatggtcacataaaaactggagagaagccttctcagaaacttctctgtgatgattgcattcaactcacagagttgaaccctcctatggatagagcagtgttgaaactctctttttgtggaacctgcaagtggatatgtggacctctccgaagatgtctttggaaacgggaatatcttcacataaaaactaaacagaagcattctcagaaacttcttggtgatgtttgcattcaaatcccagagttgaaccttcctttgatagttcaggtttgaaacactgtttctgtaggatctgcaagtggctatttggaccactctgtggccttcgttcgaaacgggtatatcttcgcataaaatctagacagaagcattctcagaatatactttgtgatgattgagtttaactcacagagctgaacattcctttggatggagcaggtttgagacacactttttgtagaatctacaagtggatatttggacctctctgaggatttcgttggaaacgggataactgcacctaactaaacggaagcattctcagaaactgctttgtgatgattgcattcacctcacagagttgaacatccctattgatagagcagtttggaaacactcttgttgtggaatgtgcaagtggagattttttagcgctttgaggaatatggtagtaaggggaatagcttcatagaaaaactagacagatgcattcacaggaactttttggtgatgtttgtattcaactcccagagttgaactttcctttggaaagagcagctatgaaacactctttttctagaatctgcaagtggacgtttggagggctttgtggtttgtggtggaaaaggaaatatcttcacctaaatactagatagaagcattctcagaagcttctctgtgatgactgcattcaactcacggagttgaacactccttttgagagcgcagttttgaaactctctttctgtggcatctgcaaggggacatgtagacctctttgaagatttcgttgcaaacggaatcatcttcacataaaaactatacagaagcagtctcagaatcttctttgtgatgtttgcattcaaatccccgagttgaactttcctttcaaagttcacgtttgaaacactctttttgcaggatctacaagtggatatttggaccactctgtgtccttcgttcgaaacgggtatatcttcacatgacatctagacagaagctttctcagaaaattctttgggatgattgagttgaactcacagagctgagcattccttgcgatgtagcagtttagaaacacactttctgcagaatctgcaagtgcatatttggacctctgtgaggaattcgttggaaacgggataatttcagctgactaaacagaagcattctcagaaccttcttcgtgatgtctgcattcaactcacagtgtggaacctttctttgatagttcaggtttgaaacactctttttgtagaaactgcaaggggataattgcactctttgaggagtaccatagtaaaggaaataacttcctataaaaagaagacagaagcattctcagaaccctcttcgtgatgtttgcattcaactcacagtgctgaacctttctttgatagttcagctttgaaacactctttttgtagaaactgcaagtggatatttggtcctctctgagcatttcgttggaaacgggataaactgcacagaactaaacagaagcattctcagaaccttcttcgtgatgtttgcattcaactcacagtgttgaacctttctttgatagttcaggtttgaaacggtctttctgtagaaactgcaagtagatatttggacctctctgaggatttcgttggaaacgggataacccgcacagaactaaaacagaagcattcacagaaaactcttggtgacgaatgagtttaactcacagagctgaacattcctttggatggagcagtttcgaaacacactatttgtagaatgtgcaagtggatatttgggcctctctgaggatttcgttggaaacgggataaaccgcacagacctaaacagaagcattctcagaaactactttgtgatgattgcattcaagtcacagagttgaacattccctttgacagagcagtttggaaactctctttgtgtagaatctgcaagtggagatatggaccgctttgaggcctatggtagtaaaggaaatagcttcatataaaagctagacagtagcattctcagaaacttctttgtgatgcttgcattcaactcacagagttgaactttcctttcgagagagaagctttgaaacactctttttccagaatctgcaagtggacatttggagggctttgaggcctgtggtggaaaaggaattatcttcccgtaaaagctagatagaagccttctcagaaacttctctgtgatgattgcattcaactcacagagttgaaggttccttttcaaagagcagtttccaatcactctttctgtggaatctgcaagtggatatttggacctattttgaagatttcgttggaaacgggagaatcttcacaggaaagctaaacagaagcattctcagaaacttcttggtgatgtttgcattcaaatcccagagtagaaccttcctttgatagttcaggtttgaaacactctttttgtaggatctgcaagtggatatttggaccactctgtggccttcgttcgaaacgggtatatctttgcataaaatctagacagaagcattctcagaaaatactttgtgatgattgagtttaactcacagcagctgaacattcctttggatggagcaggtttgagacacactttttgtagaatctacaagtggatatttggacctctctgaggatttcgttggaaacgggataactgcacctaactaaacggaagcattctcagaaactgctttgtgatgattgcattcacctcacagagttgaacattcctattgatagagcagtttggaaacactcttgttgtggaatgtgcaagtggagatttggagcgctttgaggcctatggtagtaaagggaatagcttcatagaaaaactagacagatgcattctcaggaactttttggtgatgtttgtattcaactcccagagttgaactttcctttggaaagagcagctatgaaacactctttttctagaatctgcaagtggacgtttggagggctttgtggtttgtggtggaaaaggaaatatcttcacctaaatactagacagaagcattctcagaagcttctctgtgatgactgcattcaactcacggagttgaacactccttttgagagcgcagttttgaaactctctttctgtggcatctgcaaggggacatgtagacctctttgaagatttcgttggaaacggaatcatcttcacataaaaactatacagaagcagtctcagaatcttctttgtgatgtttgcattcaaatcccagagttgaactttcctttcaaagttcacgtttgaaacactctttttgcaggatctacaagtggatatttggaccactctgtgtccttcgttcgaaacgggtatatcttcacacgacatctagacagaagctttctcagaaaattctttgggatgattgagtggaactcacagagctgaacattccttgcgatgtagcagtttagaaacacactttctgcagaatctgcaagtgcatatttggacctctctgaggaattcgttggaaacgggataatttcagctgactaaacagaagcattctcagaaccttcttcgtgatgtctgcattcaactcacagtgtggaacctttctttgatagttcaggtttgaaacactctttttgtagaaactgcaaggggataattgcacttctttgaggcctaccgtagtaaaggaaataacttcctatagaaagaagacagaagcattctcagaaccctcttcgtgatgtttgcattcaactcacagtgctgaacctttctttgatagttcagctttgaaacactcttcttgtagaaactgcaagtggatatttggtcctctctgaggatttcgttggaaacgggataaaccgcacagaactaaacagaagaattctcagagccctcttcgtgatgtttgcattcaactcacagtgctgaacctttctttgatagtgcagctttgaaacactctttttgtagaaactgcaagtggatgtttggtcctctctgaggatttcgttggaaacgggataaaccgcacagaactaaaacagaagcattgtcagaaacttctttgtgatgattgcattcaactcacagagttgaaggttccttttcaaacagcagtttccaatcactctttctgtggaatctgcaagtggatatttgggcctctctgaggatttcgttggaaacgggataaaacgcacagaactaaaacagaagcattctcagaaacttctctgtgatgtttgtgttcaactcccagagtttcacgttgcttttcatagagtagttctgaaacatgcttttcgtagtgtctgcaagtggacatttggagcgctttcaggcctgtggtggaaaacgaattatggtcacataaaaactggagagaagccttctcagaaacttctctgtgatgattgcattcaactcacagagttgaaccctcctatggatagagcagtgttgaaactctctttttgtggaatctgcaagtggatatgtggacctctccgaagatgtctttggaaacgggaatatcttcacataaaaactaaacagaagcattctcagaaacttcttggtgatgtttgcattcaaatcccagagttgagccttcctttgatagttcaggtttgaaacactctttctgtaggatctgcaagtggctatttggaccactctgtggccttcgttcgaaacgggtatatcttcgcataaaatctagacagaagcattctcagaaaatactttgtgatgattgagtttaaatcacagagctgaccattcctttggatggagcaggtttgagacacactttttgtagaatctacaagtggatatttggacctctctgaggatttcgttggaaacgggataactgcacctaactaaacggaagcattctcagaaactgctttgtgatgattgcattcacctcacagagttgaacattcctattgatagagcagtttggaaacactcttgttgtggaatgtgcaagtggagatttggagcgctttgaggcctatggtagtaaagggaatagcttcatagaaaaactagacagatgcattctcaggaaccttttggtgatgtttgtattcaactcccagagttgaactttcctttggaaagagcagctatgaaacactctttttctagaatctgcaagtggacgtttggagggctttgtggtttgtggtggaaaaggaaatatcttcacctaaatactagatagaagcattctcagaagcttctctgtgatgactgcattcaactcacggagttgaacactccttttgagagcgcagttttgaaactctctttctgtggcatctgcaaggggacatgtagacctctttgaagatttcgttggaaacggaatcatcttcacataaaaactatacagaagcagtctcagaatcttctttgtgatgtttgcattcaaatcccagagttgaactttcctttcaaagttcacgtttgaaacactctttttgcaggatctacaagtggatatttggaccactctgtgtccttcgttcgaaacgggtatatcttcacacgacatctagacagaagctttctcagaaaattctttgggatgattgagtggaactcacagagctgaacattccttgcgatgtagcagtttagaaacacactttctgcagaatctgcaagtgcatatttggacctctctgaggaattcgttggaaacgggataatttcagctgactaaacagaagcattctcagaaccttcttcgtgatgtctgcattcaactcacagtgtggaacctttctttgatagttcaggtttgaaacactctttttgtagaaactgcaaggggataattgcacttctttgaggcctaccgtagtaaaggaaataacttcctatagaaagaagacagaaagcattctcagtaaccctcttcgtgatgtttgcattcaactcacagtgctgaacctttctttgatagttcagctttgaaacactcttcttgtagaaactgcaagtggatatttggtcctctctgaggatttcgttggaaacgggttaaaccgcacagaactaaacagaagcattctcagaaccttcttcgtgatgtctgcattcaactcacagtgtggaacctttctttgatagttcaggtttgaaacggtctttctgtagaaactgcaagtagatatttggacctctctgaggatttcgttggaaacgggataaaccgcacagaactaaaacagaagcattcacagaaaactcttggtgacgactgagtttaactcacagagctgaacattcctttggatggagcagtttcgaaacacactatttgtagaatgtgcaagtggatatttgggcctctctgaggatttcattggaaacgcgataaaccgcacagaactaaacagaagcattctcagaaactactttgtgatgattgcattcaagtcacagagctgaacattccctttgacagagcagtttggaaactctctttgtgtagaatctgcaagtggagatatggaatgctttgaggactatagtagtaaaggaaatagcttcatataaaagctagacagtagcattctcagaaacttctttgtgatgcttgcattcaactcacagagttgaactttcctttcgagagagaagctttgaaacactcttttttcagaatctgcaagtggacatttggagggctttgaggcctgtggtggaaaaggaattatcttcccgtaaaagctagatagaagcattgtcagaaacttctttgtgatgattgcattcaactcacagagaatgaaggttcctttacaaacagcagtttccaaacactctttctgtggaatctgcaagtggatatttggacctctttgaagatttcgttggaaacgggagaatcttcacagaaaagctaaacagaagcattctcagaaacttctctgtgatgtttgtgttcaactcccagagtttcacattgcttttcatagagtagttctgaaacatgcttttcgtagtgtctgcaagtggacatttggagcgctttcaggcctgtggtggaaaacgaattatggtcccataaaaactggagagaagacttctcagaaccttctctgtgatgattgcattcaactcacagatttgaaccctcctatggatagaacagtgttgaaactctctttttgtggaatctgcaagtggatatgtggacctctccgaagatgtctttggaaacgggaatatcttcacctaaaaactaaacagaagcattctcagaaacttcttggtgatgtttgcattcaaatcccagagttgaaccttcctgtgatagttcaggtttgaaacactctttttgtaggatctgcaagtggatatttggaccactctgtggccttcgttccaaacgggtacatcttcacataaaatctagacagaagcattctcagaaaatactttgtgatgattgagtttaactcacagagctgaacattcctttggatggagcaggtttgagacacactttttgtagaatctacaagtggatatttggacctctctgaggatttcgttggaaacgcgataactgcacctaactaaacggaagcattctcagaaactgctttgtgatgattgcattcacctcacagagttgaacattcctattgatagagcagtttggaaacactcttgttgtggaatgtgcaagtggagatttggagcgctttgaggcctatggtagtaaagggaatagcttcatagaaaaactagacagatgcattctcaggaactttttggtgatgtttgtattcaactcccagagttgaactttcctttggaaagagcagctatgaaacactctttttctagaatctgcaagtggacgtttggagggctttgtggtttgtggtggaaaaggaaatatcttcacctaaatactaggatagaagcattctcagaagcttctctgtgatgactgcattcaactcacggagttgaacactccttttgagagcgcagttttgaaactctctttctgtggcatctgcaaggggacatgtagacctctttgaagatttcgttggaaacggaatcatcttcacataaaaactatacagaagcagtctcagaatcttctttgtgatgtttgcattcaaatcccagagttgaactttcctttcaaagttcacgtttgaaacactctttttgcaggatctacaagtggatatttggaccactctgtgtccttcgttcgaaacgggtatatcttcacacgacatctagacagaagctttctcagaaaattctttgggatgattgagtggaactcacagagctgaacattccttgcgatggagcagtttagaaacacactttctgcagaatctgcaagtgcatatttggacctctctgaggaattcgttggaaacgggataatttcagctgactaaacagaagcattctcagaaccttcttcgtgatgtctgcattcaactcacagtgtggaacctttctttgatagttcaggtttgaaacactctttttgtagaaactgcaaggggataattgcacttctttgaggcctaccgtagtaaaggaaataacttcctatagaaagaagacagaagcattctcagaaccctcttcgtgatgtttgcattcaactcacagtgctgaacctttctttgatagttcagctttgaaacactcttcttgtagaaactgcaagtggatatttggtcctctctgaggatttcgttggaaacgggataaaccgcacagaactaaacagaagaattctcagagccctcttcgtgatgtttgcattcaactcacagtgctgaacctttctttgatagtgcagctttgaaacactctttttgtagaaactgcaagtggatgtttggtcctctctgaggatttcgttggaaacgggataaaccgcacagaactaaaacagaagcattgtcagaaacttctttgtgatgattgcattcaactcacagagttgaaggttccttttcaaacagcagtttccaatcactctttctgtggaatctgcaagtggatatttgggcctctctgaggatttcgttggaaacgggataaaacgcacagaactaaaacagaagcattctcagaaacttctctgtgatgtttgtgttcaactcccagagtttcacgttgcttttcatagagtagttctgaaacatgcttttcgtagtgtctgcaagtggacatttggagcgctttcaggcctgtggtggaaaacgaattatggtcacataaaaactggagagaagccttctcagaaacttctctgtgatgattgcattcaactcacagagttgaaccctcctatggatagagcagtgttgaaactctctttttgtggaatctgcaagtggatatgtggacctctccgaagatgtctttggaaacgggaatatcttcacataaaaactaaacagaagcattctcagaaacttcttggtgatgtttgcattcaaatcccagagttgaaccttcctttgatagttcaggtttgaaacactctttctgtaggatctgcaagtggctatttggaccactctgtggccttcgttcgaaacgggtatatcttcgcataaaatctagacagaagcattctcagaaaatactttgtgatgattgagtttaaatcacagagctgaccattcctttggatggagcaggtttgagacacactttttgtagaatctacaagtggatatttggacctctctgaggatttcgttggaaacgggataactgcacctaactaaacggaagcattctcagaaactgctttgtgatgattgcattcacctcacagagttgaacattcctattgatagagcagtttggaaacactcttgttgtggaatgtgcaagtggagatttggagcgctttgaggcctatggtagtaaagggaatagcttcatagaaaaactagacagatgcattctcaggaactttttggtgatgtttgtattcaactcccagagttgaactttcctttggaaagagcagctatgaaacactctttttctagaatctgcaagtggacgtttggagggctttgtggtttgtggtggaaaaggaaatatcttcacctaaatactagatagaagcattctcagaagcttctctgtgatgactgcattcaactcacggagttgaacactccttttgagagcgcagttttgaaactctctttctgtggcatctgcaaggggacatgtagacctctttgaagatttcgttggaaacggaatcatcttcacataaaaactatacagaagcagtctcagaatcttctttgtgatgtttgcattcaaatcccagagttgaactttcctttcaaagttcacgtttgaaacactctttttgcaggatctacaagtggatatttggaccactctgtgtccttcgttcgaaacgggtatatcttcacacgacatctagacagaagctttctcagaaaattctttgggatgattgagtggaactcacagagctgaacattccttgcgatggagcagtttagaaacacactttctgcagaatctgcaagtgcatatttggacctctctgaggaattcgttggaaacgggataatttcagctgactaaacagaagcattctcagaaccttcttcgtgatgtctgcattcaactcacagtgtggaacctttctttgatagttcaggtttgaaacactctttttgtagaaactgcaaggggataattgcacttctttgaggcctaccgtagtaaaggaaataacttcctatagaaagaagacagaagcattctcagaaccctcttcgtgatgtttgcattcaactcacagtgctgaacctttctttgatagttcagctttgaaacactcttcttgtagaaactgcaagtggatatttggtcctctctgaggatttcgttggaaacgggataaaccgcacagaactaaacagaagaattctcagagccctcttcgtgatgtttgcattcaactcacagtgctgaacctttctttgatagtgcagctttgaaacactctttttgtagaaactgcaagtggatgtttggtcctctctgaggatttcgttggaaacgggataaaccgcacagaactaaaacagaagcattgtcagaaacttctttgtgatgattgcattcaactcacagagttgaaggttccttttcaaacagcagtttccaatcactctttctgtggaatctgcaagtggatatttgggcctctctgaggatttcgttggaaacgggataaaacgcacagaactaaaacagaagcattctcagaaacttctctgtgatgtttgtgttcaactcccagagtttcacgttgcttttcatagagtagttctgaaacatgcttttcgtagtgtctgcaagtggacatttggagcgctttcaggcctgtggtggaaaacgaattatggtcacataaaaactggagagaagccttctcagaaacttctctgtgatgattgcattcaactcacagagttgaaccctcctatggatagagcagtgttgaaactctctttttgtggaatctgcaagtggatatgtggacctctccgaagatgtctttggaaacgggaatatcttcacataaaaactaaacagaagcattctcagaaacttcttggtgatgtttgcattcaaatcccagagttgaaccttcctttgatagttcaggtttgaaacactctttttgtaggatctgcaagtggctatttggaccactctgtggccttcgttcgaaacgggtatatcttcgcataaaatctagacagaagcattctcagaaactactttgtgatgattgagttgaactcacagagctgaacactcctttggatggagcaggtttgagacacactttttgtagaatctacaagtggatatttggacctctctgaggatttcgttggaaacgggataactgcacctaactaaacggaagcattctcagaaactgctttgtgatgattgcattcacctcacagagttgaacattcctattgatagagcagtttggaaacactcttgttgtggaatgtgcaagtggagatttggagcgctttgaggcctatggtagtaaagggaatagcttcatagaaaaactagacagatgcattctcaggaactttttggtgatgtttgtattcaactcccagagttgaactttcctttggaaagagcagctatgaaacactctttttctagaatctgcaagtggacgtttggagggctttgtggtttgtggtggaaaaggaaatatcttcacctaaatactagatagaagcatactcagaagcttctctgtgatgactgcattcaactcacggagttgaacactccttttgagagcgcagttttgaaactctgtttctgtggtatctgcaaggggacatgtagacctctttgaagatttcgttggaaacggaatcatcttcacatcaaaactatacagaagcagtctcagaatcttctttgtgatgtttgcattcaaatcccagagttgaactttcctttcaaagttcacgtttgaaacactctttttgcaggatctacaagtggatatttggaccactctgtgtccttcgttcgaaacgggtatatcttcacatgacatctagacagaagctttctcagaaaattctttgggatgattgagtggaactcacagagctgaacattccttgcgatgtagcagtttagaaacacactttctgcagaatctgcaagtgcatatttggacctctctgaggaattcgttggaaacgggataatttcagctgactaaacagaagcattctcagaaccttcttcgtaatgtctccattcaactcacagtgtggaacctttctttgatagttcaggtttgaaacactctttttgtagaaactgcaaggggataattgcacttctttgaggcctaccgtagtaaaggaaataacttcctatagaaagaagacagaagcattctcagaaccctcttcgtgatgtttacattcaactcacagtgctgaacctttctttgatagttcagctttgaaacactcttcttgtagaaactgcaagtggatatttggtcctctctgaggatttcgttggaaacgggataaaccgcacagaactaaacagaagcattctcaggaaccttcttcgtgatgtttgcattcaactcacagtgttgaacctttctttgatagttcaggtttgaaacggtctttctgtagaaactgcaagtagatatttggacctctctgaggatttcgttggaaacgggataacccgcacagaactaaaacagaagcattcacagaaaactcttggtgacgactgagtttaactcacagagctgaacattcctttggatggagcagtttcgaaacacactatttgtagaatgtgcaagtggatatttgggcctctctgaggatttcgttggaaacgggataaaccgcacagaactaaacagaagcattctcagaaactactttgtgatgattgcattcaagtcacagagttgaacattccctttgacagagcagtttggaaactctctttgtgtagaatctgcaagtggagatatggaccgctttgaggcctatggtagtaaaggaaatagcttcatataaaagctagacagtagcattctcagaaacttctttgtgatgcttgcattcaactcacagagttgaacgttcctttcgagagagaagttttgaaacactctttttccagaatctgcaagtggacatttggagggctttgaggcctgtggtgtaaaaggaattaacttcccgtaaaagctagatagaagcattgtcagaaacttctttgtgatgattgcattcaactcacagagttgaaggttccttttcaaagagcagtttccaatcactctttgtgtggaatctgcaagtggatatttggacctattttgaagatttcgttggaaacgggagaatcttcacaggaaagctaaacagaagcattctcagaaacttcttggtgatgtttgcattcaaatcccagagtagaaccttcctttgatagttcaggtttgaaacactctttttgtaggatctgcaagtggatatttggaccactctgtggccttcgttcgaaacgggtatatcttcgcataaaatctagacagaagcattctcagaaaatactttgtgatgattgagtttaactcacagagctgaacattcctttggatggagcaggtttgagacacactttttgtagaatctacaagtggatatttggacctctctgaggatttcgttggaaacgggataactgcacctaactaaacggaagcattctcagaaactgctttgtgatgattgcattcacctcacagagttgaacattcctattgatagagcagtttggaaacactcttgttgtggaatgtgcaagtggagatttggagcgctttgaggcctatggtagtaaagggaatagcttcatagaaaaactagacagatgcattctcaggaactttttggtgatgtttgtattcaactcccagagttgaactttcctttggaaagagcagctatgaaacactctttttctagaatctgcaagtggacgtttggagggctttgtggtttgtggtggaaaaggaaatatcttcacctaaatactagatagaagcattctcagaagcttctctgtgatgactgcattcaactcacggagttgaacactccttttgagagcgcagttttgaaactctctttctgtggcatccgcaaggggacatgtggacctctttgaagatttcgttggaaacggaatcatcttcacataaaaactatacagaagcagtctcagaatcttctttgtgatgtttgcattcaaatcccagagttgaacttgcctttcaaagttcacgtttgaaacactctttttgcaggatctacaagtggatatttggaccactctgtgtccttcgttcgaaacgggtatatcttcacatgacatctagacagaagctttctcagaaaattctttgggatgattgagtggaactcacagagctgaacattccttgcgatggagcagtttagaaacacactttctgcagaatctgcaagtgcatatttggacctctctgaggaattcgttggaaacgggataatttcagctgactaaacagaagcattctcagaaccttcttcgtgatgtctgcattcaactcacagtgtggaacctttctttgatagttcaggtttgaaacactctttttgtagaaactgcaaggggataattgcacttctttgaggcctaccgtagtaaaggaaataacttcctatagaaagaagacagaagcattctcagaaccctcttcgtgatgtttgcattcaactcacagtgctgaacctttctttgatagttcagctttgaaacactcttcttgtagaaactgcaagtggatatttggtcctctctgaggatttcgttggaaacgggataaaccgcacagaactaaacagaagcattctcagagccctcttcgtgatgtttgcattcaactcacagtgctgaacctttctttgatagtgcagctttgaaacactctttttgtagaaactgcaagtggatgtttggtcctctctgaggatttcgttggaaacgggataaaccgcacagaactaaaacagaagcattgtcagaaacttctttgtgatgattgcattcaactcacagtagttgaaggttccttttcaaacagcagtttccaatcactctttctgtggaatctgcaagtggatatttgggcctctctgaggatttcgttggaaacgggataaaacgcacagaactaaaacagaagcattctcagaaacttctctgtgatgtttgtgttcaactcccagagtttcacgttgcttttcatagagtacttctgaaacatgcttttcgtaatgtctgcaagtggacatttggagcgctttcaggcctgtggtggaaaacgaattatggtcacataaaaactggagagaagccttctcagaaacttctctgtgatgattgcattcaactcacagagttgaaccctcctatggatagagcagtgttgaaactctctttttgtggaatctgcaagtggatatgtggacctctccgaagatgtctttggaaacgggaatatcttcacataaaaactaaacagaagcattctcagaaacttcttggtgatgtttgcattcaaatcccagagttgaaccttcctttgagagttcaggtttgaaacactctttttgtaggatctgcaagtggatatttggaccactctgtggccttcgtttgaaacgggtacatcttcgcataaaatctagacaaaagcattctcagaaaatactttgtgatgattgagttgaactcacagagctgaacattcctttggatggagcaggtttgagacacactttttgtagaatctacaaggggatatttggacctctctgaggatttcgttggaaacgggataactgcacctaactaaacggaagcattctcagaaactgctttgtgatgattgcattcacctcacagagttgaacattcctattgatagagcagtttggaaacactcttcttgtggaatgtgcaagtggagatttggagcgctttgaggcctatggtagtaaagggaatagcttcatagaaaaactagacagatgcattctcaggaactttttggtgatgtttgtattcaactcccagagttgaactttcctttggaaagagcagctatgaaacactctttttctagaatctgcaagtggacgtttggagggctttgtggtttgtggtggaaaaggaaatatcttcacctaaatactagatagaagcattctcagaagcttctctgtgatgactgcattcaactcacggagttgaacactccttttgagagcgcagttttgaaactctctttctgtggcatctgcaaggggacatgtagacctctttgaagatttcgttggaaacggaatcatcttcacataaaaactatacagaagcagtctcagaatcttctttgtgatgtttgcattcaaatcccagagttgaactttcctttcaaagttcacgtttgaaacactctttttgcaggatctacaagtggatatttggaccactctgtgtccttcgttcgaaacgggtatatcttcacacgacatctagacagaagctttctcagaaaattctttgggatgattgagtggaactcacagagctgaacattccttgcgatggagcagtttagaaacacactttctgcagaatctgcaagtgcatatttggacctctctgaggaattcgttggaaacgggataatttcagctgactaaacagaagcattctcagaaccttcttcgtgatgtctgcattcaactcacagtgtggaacctttctttgatagttcaggtttgaaacactctttttgtagaaactgcaaggggataattgcacttctttgaggcctaccgtagtaaaggaaataacttcctatagaaagaagacagaagcattctcagaaccctgttcgtgatgtttgcattcaactcacagtgctgaacctttctttgatagttcagctttgaaacactcttcttgtagaaactgcaagtggatatttggtcctctctgaggatttcgttggaaacgggataaaccgcacagaactaaaacagaagcattctcagagccctcttcgtgatgtttgcattcaactcacagtgctgaacctttctttgatagtgcagctttgaaacactctttttgtagaaactgcaagtggatgtttggtcctctctgaggatttcgttggaaacgggataaaccgcacagaactaaaacagaagcattgtcagaaacttctttgtgatgattgcattcaactcacagagttgaaggttccttttcaaacagcagtttccaatcactctttctgtggaatctgcaagtggatatttgggcctctctgaggatttcgttggaaacgggataaaacgcacagaactaaaacagaagcattctcagaaacttctctgtgatgtttgtgttcaactcccagagtttcacgttgcttttcatagagtagttctgaaacatgcttttcgtagtgtctgcaagtggacatttggagcgctttcaggcctgtggtggaaaacgaattatggtcacataaaaactggagagaagccttctcagaaacttctctgtgatgattgcattcaactcacagagttgaaccctcctatggatagagcagtgttgaaactctctttttgtggaatctgcaagtggatatgtggacctctccgaagatgtctttggaaacgggaatatcttcacataaaaactaaacagaagcattctcagaaacttcttggtgatgtttgcattcaaatcccagagttgaaccttcctttgatagttcaggtttgaaacactctttctgtaggatctgcaagtggctatttggaccactctgtggccttcgttcgaaacgggtatatcttcgcataaaatctagacagaagcattctcagaaaatactttgtgatgattgagtttaaatcacagagctgaccattcctttggatggagcaggtttgagacacactttttgtagaatctacaagtggatatttggacctctctgaggatttcgttggaaacgggataactgcacctaactaaacggaagcattctcagaaactgctttgtgatgattgcattcacctcacagagttgaacattcctattgatagagcagtttggaaacactcttgttgcggaatgtgcaagtggagatttggagcgctttgaggcctgtggtagtaaagggaatagcttcatagaaaaactagacagatgcattctcaggaactttttggtgatgtttgtattcaactcccagagttgaactttcctttggaaagagcagctatgaaacactctttttctagaatctgcaagtggacgtttggagggctttgtggtttgtggtggaaaaggaaatatcttcacctaaatactagatagaagcattctcagaagcttctctgtgatgactgcattcaactcacggagttgaacactccttttgagagcgcagttttgaaactctctttctgtggcatctgcaaggggacatgtagacctctttgaagatttcgttggaaacggaatcatcttcacataaaaactatacagaagcattctcagaatcttctttgtgatgtttgcattcaaatcccagagttgaactttcctttcaaagttcacgtttgaaacactctttttgcaggatctacaagtggatatttggaccactctgtgtccttcgttcgaaacgggtatatcttcacatgacatctagacagaagctttctcagaaaattctttgggatgagtgagtggaactcacagagctgaacattccttgcgatgtagcagtttagaaacacagtttctgcagaatctgcaagtgcatatttggacctctctgaggaattcgttggaaacgggataatttcagctgactaaacagaagcattctcagaaccttcttcgtgatgtctgcattcaactcacagtgtggaacctttctttgatagttcaggtttgaaacactctttttgtagaaagtgcaaggggataattgcacttctttgaggcctaccgtagtaaaggaaataacttcctatagaaagaagacagaagcattctcagaaccctcttcgtgatgtttgcattcaactcacagtgctgaacctttctttgatagttcagctttgaaacactcttcttgtagaaactgcaagtggatatttggtcctctctgaggatttcgttggaaacgggataaactgcacagaactaaacagaagcattctcagagccctcttcgtgatgtttgcattcaactcacagtgctgaacctttctttgatagtgcagctttgaaacactctttttgtagaaactgcaagtggatatttggtcctctctgaggatttcgttggaaatgggataaaccgcacagaactaaaacagaagcattcacagaaaactcttggtgacgactgagtttaactcacagagctgaacattcctttggatggagcagtttcgaaacacactatttgtagaatgtgcaagtggatatttgggcctctctcaggatttcgttggaaacgggataaaacgcacagaactaaatcagaagcattctcagaaactactttgtgatgattgcattcaagtcacagagttgaacattccctttgacagagcagtttggaaactctctttgtgtagaatctgcaagtggagatatggaccgctttgaggcctatggtagtaaaggaaatagcttcatataaaagctagacagtagcattctcagaaacttctttgtgatgcttgcattcaactcacagagttgaactttcctttcgagagagaagctttgaaacactctttttccggaatctgcaagtggacatttggagggctttgaggcctgtggtggaaaaggaattatcttctcgtaaaagctagatagaagcattgtcagaaacttctttgtgatgattgcattcaactcacagagttgaaggttccatttcaaacagcagtttccaatcactctttctgtggaatctgcaagtgggtatttcgacctctttgaagatttcgttggaaacgggagaatcttcacagaaaagctaaacagaagcattctcagaaacttctctgtgatgtttgtgttcaactcccagagtttcacgttgcttttcatagagtagttctgaaacatgcttttcgtagtgtctgcaagtggacatttggagcgctttcaggcctgtggtggaaaacgaattagggtcacataaaaactggagagaagccttctcagaaacttctctgtgatgattgcattcaactcacagagttgaaccctcctatggatagagcagtgttgaaactctctttttgtggaatctgcaagtggacatgtggacctctccgaagatgtctttggaaacaggaatatcttcacataaaaactaaacagaagcattctcagaaacttcttggtgatgtttgcattcaaatcccagagttgaaccttcctttgatagttcaggtttgaaacactctttctgtaggatctgcaagtggctatttggaccactctgtggccttcgttcgaaacgggtatatcttcgcataaaatctagacagaagcattctcagaaaatactttgtgatgattgagtttaaatcacagagctgaccattcctttggatggagcaggtttgagacacactttttgtagaatctacaagtggatatttggacctctctgaggatttcgttggaaacgggataactgcacctaactaaacggaagcattctcagaaactgctttgtgatgattgcattcacctcacagagttgaacattcctattgatagagcagtttggaaacactcttgttgtggaatgtgcaagtggagatttggagcgctttgaggcctatggtagtaaagggaatagcttcatagaaaaactagacagatgcattctcaggaaccttttggtgatgtttgtattcaactcccagagttgaactttcctttggaaagagcagctatgaaacactctttttctagaatctgcaagtggacgtttggagggctttgtggtttgtggtggaaaaggaaatatcttcacctaaatactagatagaagcattctcagaagcttctctgtgatgactgcattcaactcacggagttgaacactccttttgagagcgcagttttgaaactctctttctgtggcatctgcaaggggacatgtagacctctttgaagatttcgttggaaacggaatcatcttcacataaaaactatacagaagcagtctcagaatcttctttgtgatgtttgcattcaaatcccagagttgaactttcctttcaaagttcacgtttgaaacactctttttgcaggatctacaagtggatatttggaccactctgtgtccttcgttcgaaacgggtatatcttcacacgacatctagacagaagctttctcagaaaattctttgggatgattgagtggaactcacagagctgaacattccttgcgatgtagcagtttagaaacacactttctgcagaatctgcaagtgcatatttggacctctctgaggaattcgttggaaacgggataatttcagctgactaaacagaagcattctcagaacttcttcgtgatgtctgcattcaactcacagtgtggaacctttctttgatagttcaggtttgaaacactctttttgtagaaactgcaaggggataattgcacttctttgaggcctaccgtagtaaaggaaataacttcctatagaaagaagacagaagaattctcagagccctcttcgtgatgtttgcattcaactcacagtgctgaacctttctttgatagtgcagctttgaaacactctttttgtagaaactgcaagtggatgtttggtcctctctgaggatttcgttggaaacgggataaaccgcacagaactaaaacagaagcattgtcagaaacttctttgtgatgattgcattcaactcacagagttgaaggttccttttcaaacagcagtttccaatcactctttctgtggaatctgcaagtggatatttgggcctctctgaggatttcgttggaaacgggataaaacgcacagaactaaaacagaagcattctcagaaacttctctgtgatgtttgtgttcaactcccagagtttcacgttgcttttcatagagtacttctgaaacatgcttttcgtagtgtctgcaagtggacatttggagcgctttcaggcctgtggtggaaaacgaattatggtcacataaaaactggagagaagccttctcagaaacttctctgtgatgattgcattcaactcacagagttgaaccctcctatggatagagcagtgttgaaactctctttttgtggaatctgcaagtggatatgtggacctctccgaagatgtctttggaaacgggaatatcttcacataaaaactaaacagaagcattctcagaaacttcttggtgatgtttgcattcaaatcccagagttgaaccttcctttgatagttcaggtttgaaacactctttttgtaggatctgcaagtggatatttggaccactctgtggccttcgttcgaaacgggtatatcttcgcataaaatccagacagaagcactctcagaaaatactttgtgatgattgagtttaactcacagagctgaacgttcctttggatggagcaggtttgagacacacatttgtagaatctacaagtggatatttggacctctctgaggatttcgttggaaacgcgataactgcacctaactaaacggaagcattctcagaaactgctttgtgatgattgcattcacctcacagagttgaacattcctattgatagagcagtttggacaccctcttgttgtggaatgtgcaagtggagatttggagcgctttgaggcctatggtagtaaagggaatagcttcatagaaaaactagacagatgcattctcaggaactttttggtgatgtttgtattcaactcccagagttgaactttcctttggaaagagcagctatgaaacactctttttctagaatctgcaagtggacgtttggagggctttgtggtttgtggtggaaaaggaaatatcttcacctaaatactagatagaagcattctcagaagcttctctgtgatgactgcattcaactcacggagttgaacactccttttgagagcgcagttttgaaactctctttctgtggcatctgcaaggggacatgtagacctctttgaagatttcgttggaaacgaatcatcttcacataaaaactatacagaagcagtctcagaatcttctttgtgatgtttgcattcaaatcccagagttgaactttcctttcaaagttcacgtttgaaacactctttttgcaggatctacaagtggatatttggaccactctgtgtccttcgttcgaaacgggtatatcttcacatgacatctagacagaagctttctcagaaaattgtttgggatgattgatttgaactcacagagctgagcattccttgcgatgtagcagtttagaaacacactttctgcagaatctgcaagtgcatatttggacctctctgaggaattcgttggaaacgggataatttcagctgactaaacagaagcattctcagaaccttcttcgtgatgtctgcattcaactcacagtgtggaacctttctttgatagttcaggtttgaaacactctttttgtagaaactgcaaggggataattgcactctttgaggagtaccgtagtaaaggaaataacttcctataaaaagaagacagaagcattctcagaaccctcttcgtgatgtttgcattcaactcacagtgctgaacctttctttgatagttcagctttgaaacactctttttgtagaaactgcaaatggatatttggtcctctctgaggatttcgttggaaaagggataaaacgcccagaactaaacagaagcattcacagaaaactcttggtgacgactgagtttaactcacagagctgaacattcctttggatggagcagtttcaaaacacactatttgtagaatctgcaagtggatatgtgggcctctctgaggatttcgttggaaacgggataaaccgcacagaactaaaacagaagcattctcagaaactactttgtgatgattgcattcaagtcacagagttgaacattccctttgacagagcagtttggaaactctctttgtgtagaatctgcaagtggagatatggaccgctttgaggcctatggtagtaaaggaaatagcttcatataaaagctagacagtagcattctcagaaacttctttgtgatgcttgcattcaactcacagagttgaactttcctttcgagagagaagctttgaaacactctttttccagaatgtgcaagtggagatttggagggctttgaggcctgtggtggaaaaggaatcatcttcccgtaaaagctagatggaagcattgtcagaaacttctttgtgatgattgcattcaactcacagagttgaaggttccttttcaaacagcagtttccaatcactctttctgtggaatctgcaagtggatatttggacctagtttgaagatttcgttggaaacgggataatcttcacagaaaagctaaacagaagcattctcagaaacttctctgtgatgtttgtgttcaactcccagagtttcacattgcttttcatagagtagttctgaaacatgcttttcgtagggtctgcaagtggacatttggagcgctttcaggcctgtggtggaaaacgaattatggtcacataaaaactggagagaagccttctcagaaacttctctgtgatgattgcattcaactcacagagttgaaccctcctatggatagagaagtgttgaaactctctttttgtggaatctgcaagcggatatgtggacctctccgaagatgtctttggaaacgggaatatcttcacataaaaactaaacagaagcattctcagaaacttcttggtgatgtttgcattcaaatcccagagttgaaccttcctttgatagttcaggtttgaaacactctttttgtaggatctgcaagtggatatttggaccactctgtggccttcgttcgaaacgggtacatcttcgcataaaatctagacagaagcattctcagaaaatactttgtgatgattgagtttaactcacagagctgaacattcctttgaatggagcaggtttgagacacactttttgtagaatctacaagtggatatttggacctctctgaggattttgttggaaacgggataactgcacctaactaaacggaagcattctcagaaactgctttgtgatgattgcattcacctcacagagttgaacattcctattgatagagcagtttggaaacactcttgttgtggaatgtgcaagtggagatttggagcgctttgaggcctatggtagtaaagggaatagcttcatagaaaaactagacagatgcattctcaggaactttttggtgatgtttgtattcaactcccagagttgaactttcctttggaaagagcagctatgaaacactctttttctagaatctgcaagtggacgtttggagggctttgtggtttgtggtggaaaaggaaatatcttcacctaaatactagagagaagcattctcagaagcttctctgtgatgactgcattcaactcacggagttgaacactccttttgagagcgcagttttgaaactctctttctgtggcatccgcaaggggacatgtagacctctttgaagatttcgttggaaacggaatcatcttcacataaaaactatacagaagcagtctcagaatcttctttgtgatgtttgcattcaaatcccagaattgaactttactttaaagttcacgtttgaaacactctttttgcaggatctacaagtggatatttggaccactctgtgtccttcgttcgaaacgggtatatcttcacatgacatctagacagaagctttctcagaaaattctttgggatgattgagtggaactcacagagctgaacattccttgcgatgtagcagtttagaaacacactttctgcagaatctgcaagtgcatatttggacctctctgaggaattcgttggaaacgggataatttcagctgactaaacagaagcattctcagaaccttcttcgtgatgtctgcattcaactcacagtgtggaacctttctttgatagttcaggtttgaaacactctttttgtagaaactgcaaggggataattgcacttctttgaggcctaccgtagtaaaggaaataacttcctatagaaagaagacagaagcattctcagaaccctcttcgtgatgtttgcattcaactcacagtgctgaacctttctttgatagttcagctttgaaacactcttcttgtagaaactgcaagtggatatttggtcctctctgaggatttcgttggaaacgggataaaccgcacagaactaaacagaagaattctcagagccctcttcgtgatgtttgcattcaactcacagtgctgaacctttctttgatagtgcagctttgaaacactctttttgtagaaactgcaagtggatgtttggtcctctctgaggatttcgttggaaacgggataaaccgcacagaactaaaacagaagcattgtcagaaacttctttgtgatgattgcattcaactcacagagttgaaggttccttttcaaacagcagtttccaatcactctttctgtggaatctgcaagtggatatttgggcctctctgaggatttcgttggaaacgggataaaacgcacagaactaaaacagaagcattctcagaaacttctctgtgatgtttgtgttcaactcccagagtttcacgttgcttttcatagagtagttctgaaacatgcttttcgtagtgtctgcaagtggacatttggagcgctttcaggcctgtggtggaaaacgaattatggtcacataaaaactggagagagccttctcagaaacttctctgtgatgattgcattcaactcacagagttgaaccctcctatggatagagcagtgttgaaactctctttttgtggaatctgcaagtggatatgtggacctctccgaagatgtctttggaaacgggaatatcttcacataaaaactaaacagaagcattctcagaaacttcttggtgatgtttgcattcaaatcccagagttgaaccttcctttggtagttcaggtttgaaacactctttttgtaggatctgcaagtggatatttggaccactctgtggccttcgttcgaaacgggtacatcttcgcataaaatctagacagaagcattctcagaaaatactttgtgatgattgagtttaaatcacagagctgaccattcctttggatggagcaggtttgagacacactttttgtagaatctacaagtggatatttggacctctctgaggatttcgttggaaacgggataactgcacctaactaaacggaagcattctcagaaactgctttgtgatgattgcattcacctcacagagttgaacattcctattgatagagcagtttggaaacactcttgttgtggaatgtgcaagtggagatttggagcgctttgaggcctatggtagtaaagggaatagcttcatagaaaaactagacagatgcattctcaggaaccttttggtgatgtttgtattcaactcccagagttgaactttcctttggaaagagcagctatgaaacactctttttctagaatctgcaagtggacgtttggagggctttgtggtttgtggtggaaaaggaaatatcttcacctaaatactagatagaagcattctcagaagcttctctgtgatgactgcattcaactcacggagttgaacactccttttgagagcgcagttttgaaactctctttctgtggcatctgcaaggggacatgtagacctctttgaagatttcgttggaaacggaatcatcttcacataaaaactatacagaagcagtctcagaatcttctttgtgatgtttgcattcaaatcccagagttgaactttcctttcaaagttcacgtttgaaacactctttttgcaggatctacaagtggatatttggaccactctgtgtccttcgttcgaaacgggtatatcttcacacgacatctagacagaagctttctcagaaaattctttgggatgattgagtggaactcacagagctgaacattccttgcgatggagcagtttagaaacacactttctgcagaatctgcaagtgcatatttggacctctctgaggaattcgttggaaacgggataatttcagctgactaaacagaagcattctcagaaccttcttcgtgatgtctgcattcaactcacagtgtggaacctttctttgatagttcaggtttgaaacactctttttgtagaaactgcaaggggataattgcacttctttgaggcctaccgtagtaaaggaaataacttcctatagaaagaagacagaagcattctcagaaccctcttcgtgatgtttgcattcaactcacagtgctgaacctttctttgatagttcagctttgaaacactcttcttgtagaaactgcaagtggatatttggtcctctctgaggatttcgttggaaacgggataaaccgcacagaactaaacagaagaattctcagagccctcttcgtgatgtttgcattcaactcacagtgctgaacctttctttgatagtgcagctttgaaacactctttttgtagaaactgcaagtggatgtttggtcctctctgaggatttcgttggaaacgggataaaccgcacagaactaaaacagaagcattgtcagaaacttctttgtgatgattgcattcaactcacagagttgaaggttccttttcaaacagcagtttccaatcactctttctgtggaatctgcaagtggatatttgggcctctctgaggatttcgttggaaacgggataaaacgcacagaactaaaacagaagcattctcagaaacttctctgtgatgtttgtgttcaactcccagagtttcacgttgcttttcatagagtagttctgaaacatgcttttcgtagtgtctgcaagtggacatttggagcgctttcaggcctgtggtggaaaacgaattatggtcacataaaaactggagagaagccttctcagaaacttctctgtgatgattgcattcaactcacagagttgaaccctcctatgggtagagcagtgttgaaactctctttttgtggaatctgcaagtggatatgtggacctctccgaagatgtctttggaaacgggaatatcttcacataaaaactaaacagaagcattctcagaaacttcttggtgatgtttgcattcaaatcccagagttgaaccttcctttgatagttcaggtttgaaacactctttctgtaggatctgcaagtggctatttggaccactctgtggccttcgttcgaaacgggtatatcttcgcataaaatctagacagaagcattctcagaaaatactttgtgatgattgagtttaaatcacagagctgaccattcctttggatggagcaggtttgagacacactttttgtagaatctacaagtggatatttggacctctctgaggatttcgttggaaacgggataactgcacctaactaaacggaagcattctcagaaactgctttgtgatgattgcattcacctcacagagttgaacattcctattgatagagcagtttggaaacactcttgttgtggaatgtgcaagtggagatttggagcgctttgaggcctgtggtagtaaagggaatagcttcatagaaaaactagacagatgcattctcaggaactttttggtgatgtttgtattcaactcccagagttgaactttcctttggaaagagcagctatgaaacactctttttctagaatctgcaagtggacgtttggagggctttgtggtttgtggtgcaaaaggaaatatcttcacctaaatactagatagaagcattctcagaagcttctctgtgatgactgcattcaactcacggagttgaacactccttttgagagcgcagttttgaaactctctttctgtggcatctgcaaggggacatgtagacctctttgaagatttcgttggaaacggaatcatcttcacataaaaactatacagaagcagtctcagaatcttctttgtgatgtttgcattcaaatcccagagttgaactttcctttcaaagttcacgtttgaaacactctttttgcaggatctacaagtggatatttggaccactctgtgtccttcgttcgaaacgggtatatcttcacatgacatctagacagaagctttctcagaaaattctttgggatgattgagttgaactcacagagctgaacattccttgcgatgtagcagtttagaaacacactttctgcagaatctgcaagtgcatatttggacttctctgaggaattcgttggaaacgggataatttcagctgactaaacagaagcattctcagaaccttcttcgtgatgtctgcattcaactcacagtgtggaacttttctttgatagttcaggtttgaaacactctttttgtagaaactgcaaggggataattgcacttctttcaggtctaccgtagtaaaggaaataacttcctataaaaagaagacagaagcattctcagaaccctcttcgtgatgtttgcattcaactcacagtgctgaatctttctttgatagttcagctttgaaacactcttcttgtagaaactgcaagtggatatttggtcctctctgaggatttcgttggaaacgggataaaccgcacagaactaaacagaagcattctcagaaccttcttcgtgatgtttgcattcaactcacagtgttgaacctttctttgatagttcaggtttgaaacggtctttctgtagaaactgcaagtagatatttggacctctctgaggatttcgttggaaacgggataacccgcacagaactaaaacagaagcattcacagaaaactcttggtgacgactgagtttaactcacagagctgaacattcctttggatggagcagtttcgaaacacactatttgtaggatgtgcaagtggatatttgggcctctctgaggatttcgttggaaacgggataaaccgcacagaactaaacagaagcattctcagaaactactttgtgatgattgcattcaagtcacagagttgaacattccctttgacagagcagtttggaaactctctttgtgtagaatctgcaagtggagatatggaccgctttgaggcctatggtagtaaaggaaatagcttcatataaaagctagacagtagcattctcagaaacttcgttgtgatgcttgcattcaactcacagagttgaactttcctttcgagagagaagccttgaaacactctttttccagaatctgcaagtggacatttggagggctttgaggcctgtggtggaaaaggaattatcttcccgtaaaagctagatagaagcattgtcagaaacttctttgtgatgattgcattcaactcacagagttgaaggttccttttcaaacagcagtttccaatcactctttctgtggaatctgcaagtggatatttgggcctctctgaggatttcgttggaaacgggataaaacgcacagaactaaaacagaagcattctcagaaacttctctgtgatgtttgtgttcaactcccagagtttcacgttgcttttcatagagtagttctgaaacatgcttttcgtagtgtctgcaagtggacatttggagcgctttcaggcctgtggtggaaaacgaattatggtcacataaaaactggagagaagccttctcagaaacttctctgtgatgattgcattcaactcacagagttgaaccctcctatggatagagcagtgttgaaactctctttttgtggaatctgcaagtggatatgtggacctctccgaagatgtctttggaaacgggaatatcttcacataaaaactaaacagaagcattctcagaaacttcttggtgatgtttgcattcaaatcccagagttgaaccttcctttgatagttcaggtttgaaacactctttctgtaggatctgcaagtggctatttggaccactctgtggccttcgttcgaaatgggtatatcttcgcataaaatctagacagaagcattctcagaaaatactttgtgatgattgagtttaaatcacagagctgaccattcctttggatggagcaggtttgagacacactttttgtagaatctacaagtggatatttggacctctctgaggatttcgttggaaacgggataactgcacctaactaaacggaagcattctcagaaactgctttgtgatgattgcattcacctcacagagttgaacattcctattgatagagcagtttggaaacactcttgttgtggaatgtgcaagtggagatttggagcgctttgaggcctatggtagtaaagggaatagcttcatagaaaaactagacagatgcattctcaggaaccttttggtgatgtttgtattcaactcccagagttgaactttcctttggaaagagcagctatgaaacactctttttctagaatctgcaagtggacgtttggagggctttgtggtttgtggtggaaaaggaaatatcttcacctaaatactagatagaagcattctcagaagcttctctgtgatgactgcattcaactcacggagttgaacactccttttgagagcgcagttttgaaactctctttctgtggcatctgcaaggggacatgtagacctctttgaagatttcgttggaaacggaatcatcttcacataaaaactatacagaagcagtctcagaatcttctttgtgatgtttgcattcaaatcccagagttgaactttcctttcaaagttcacgtttgaaacactctttttgcaggatctacaagtggatatttggaccactctgtgtccttcgttcgaaacgggtatatcttcacacgacatctagacagaagctttctcagaaaattctttgggatgattgagtggaactcacagagctgaacattccttgcgatgtagcagtttagaaacacactttctgcagaatctgcaagtgcatatttggacctctctgaggaattcgttggaaacgggataatttcagctgactaaacagaagcattctcagaaccttcttcgtgatgtctgcattcaactcacagtgtggaacctttctttgatagttcaggtttgaaacactctttttgtagaaactgcaaggggataattgcacttctttgaggcctaccgtagtaaaggaaataacttcctatagaaagaagacagaagcattctcagaaccctcttcgtgatgtttgcattcaactcacagtgctgaacctttctttgatagttcagctttgaaacactcttcttgtagaaactgcaagtggatatttggtcctctctgaggatttcgttggaaacgggataaaccgcacagaactaaacagaagaattctcagagccctcttcgtgatgtttgcattcaactcacagtgctgaacctttctttgatagtgcagctttgaaacactctttttgtagaaactgcaagtggatgtttggtcctctctgaggatttcgttggaaacgggataaaccgcacagaactaaaacagaagcattgtcagaaacttctttgtgatgattgcattcaactcacagagttgaaggttccttttcaaacagcagtttccaatcactctttctgtggaatctgcaagtggatatttgggcctctctgaggatttcgttggaaacgggataaaacgcacagaactaaaacagaagcattctcagaaacttctctgtgatgtttgtgttcaactcccagagtttcacgttgcttttcatagagtagttctgaaacatgcttttcgtagtgtctgcaagtggacatttggagcgctttcaggcctgtggtggaaaacgaattatggtcacataaaaactggagagaagccttctcagaaacttctctgtgatgattgcattcaactcacagagttgaaccctcctatggatagagcagtgttgaaactctctttttgtggaatctgcaagtggatatgtggacctctccgaagatgtctttggaaacgggaatatcttcacataaaaactaaacagaagcattctcagaaacttcttggtgatgtttgcattcaaatcccagagttgaaccttcctttgatagttcaggtttgaaacactctttctgtaggatctgcaagtggctatttggaccactctgtggccttcgttcgaaacgggtatatcttcgcataaaatctagacagaagcattctcagaaaatactttgtgatgattgagtttaaatcacagagctgaccattcctttggatggagcaggtttgagacacactttttgtagaatctacaagtggatatttggacctctctgaggatttcgttggaaacgggataactgcacctaactaaacggaagcattctcagaaactgctttgtgatgattgcattcacctcacagagttgaacattcctattgatagagcagtttggaaacactcttgttgtggaatgtgcaagtggagatttggagcgctttgaggcctatggtagtaaagggaatagcttcatagaaaaactagacagatgcattctcaggaactttttggtgatgtttgtattcaactcccagagttgaactttcctttggaaagagcagctatgaaacactctttttctagaatctgcaagtggacgtttggagggctttgtggtttgtggtggaaaaggaaatatcttcacctaaatactagatagaagcattctcagaagcttctctgtgatgactgcattcaactcacggagttgaacactccttttgagagcgcagttttgaaattctctttctgtggcatctgcaaggggacatgtagacctctttgaagatttcgttggaaacggaatcatcttcacataaaaactatacagaagcagtctcagaatcttctttgtgatgtttgcattcaaatcccagagttgaactttcctttcaaagttcacgtttgaaacactctttttgctggatctacaagtggatatttggaccactctgtgtccttcgttcgaaacgggtatatcttcacatgacatctagacagaagctttctcagaaaattctttgggatgattgagttgaactcacagagctgagcattccttgcgatgtagcagtttagaaacacactttctgcagaatctgcaagtgcatatttggacctctgtgaggaattcgttggaaacgggataatttcagctgactaaacagaagcattctcagaaccttcttcgtgatgtctgcattcaactcacagtgtggaacctttctttgatagttcaggtttgaaacactctttctgtagaaactgcaaggggataattgcactctttgaggagtaccgtagtaaaggaaataacttcctataaaaagaagacagaagcattctcagaaccctcttcgtgatgtttgcattcaactcacagtgctgaacctttctttgatagttcagctttgaaacactctttttgtagaaactgcaagtggatatttggtcctctctgagcatttcgttggaaacgggataaactgcacagaactaaacagaagcattctcagaaccttcttcgtgatgtttgcattcaactcacagtgtggaacctttctttgatagttcaggtttgaaacggtctttctgtagaaactgcaagtagatatttggacctctctgaggatttcgttggaaacgggataacccgcacagaactaaaacagaagcattcacagaaaactcttggtgacgactgagtttaactcacagagctgaacattcctttggatggagcagtttcgaaacacactatttgtagaatgtgcaagtggatatttgggcctctctgaggatttcgttggaaacgggataaaccgcacagaactaaacagaagcattctcagaaactactttgtgatgattgcattcaagtcacagagttgaacattccctttgacagagcagtttggaaactctctttgtgtagaatctgcaagtggagatatggaccgctttgaggcctatggtagtaaaggaaatagcttcatataaaagctagacagtagcattctcagaaacttctttgtgatgcttgcattcaactcacagagttgaactttcctttcgagagagaagctttgaaacactctttttccagaatctgcaagtggacatttggagggctttgaggcctgtggtggaaaaggaattatcttcccgtaaaagctagatagaagcattgtcagaaacttctttgtgatgattgcattcaactcacagagttgaaggttccttttcaaagagcagtttccaatcactctttgtgtggaatctgcaagtggatattcggacctattttgaagatttcgttggaaacgggagaatcttcacaggaaagctaaacagaagcattctcagaaacttctctgtgatgtttgtgttcaactcccagagtttcacattgcttttcatagagtagttctgaaacatgcttttcgtagtgtctacaagtggacatttggagcgctttcaggcctgtggtggaaaacgaattatggtcacataaaaactggagagaagccttctcagaaacttctctgtgatgattgcattcaactcacagagttgaaccctcctatggatagagcagtgttgaaactctctttttgtggaatctgcaagtggatacgtggacctctccgaagatgtctttggaaacgggaatatcttcacataaaaactaaacagaagcattctcagaaacttcttggtgatgtttgcattcaaatcccagagttgaaccttcctttgatagttcaggtttgaaacactctttttgtaggatctgcaagtggatatttggaccactctgtggccttcgttcgaaacgggtatatcttcgcataaaatctagacagaagcattctcagaaaatactttgtgatgattgagtttaactcacagcagctgaacattcctttggatggagcaggtttgagacacactttttgtagaatctacaagtggatatttggacctctctgaggatttcgttggaaacgggataactgcacctaactaaacggaagcattctcagaaactgctttgtgatgattgcattcacctcacagagttgaacattcctattgatagagcagtttggaaacactcttgttgtggaatgtgcaagtggagatttggagcgctttgaggcctatggtagtaaagggaatagcttcatagaaaaactagacagatgcattctcaggaactttttggtgatgtttgtattcaactcccagagttgaactttcctttggaaagagcagctatgaaacactctttttctagaatctgcaagtggacgtttggagggctttgtggtttgtggtggaaaaggaaatatcttcacctaaatactagagagaagcattctcagaagcttctctgtgatgactgcattcaactcacggggttgaacactccttttgggagcgcagttttgaaactctctttctgtggcatctgcaaggggacatgtagacctctttgaagatttcgttggaaacggaatcatcttcacataaaaactatacagaagcagtctcagaatcttctttgtgatgtttgcattcaaatcccagagttgaactttcctttcaaagttcacgtttgaaacactctttttgcaggatctacaagtggatatttggaccactctgtgtccttcgttcgaaacgggtatatcttcacatgacatctagacagaagctttctcagaaaattctttgggatgattgagttgaactcacagagctgaacattccttgcgatggagcagttagaaacacactttctgcagaatctgcaagtgcatatttggacctctctgaggaattcgttggaaacgggttaatttcagctgactaaacagaagcattctcagtaccttcttcgtgatgtctgcatgcaactcacagtgtggaacctttctttgatagttcaggtttgaaacactctttttgtggaaactgcaaggggataattgcacttctttgaggcccaccgtagtaatggaaataacttcctataaaaagaagacagaagcattctcagaaccctcttcgtgatgtttgcattcaactcacagtgctgaacctttctttgatagttcagctttgaaacactctttttgtagaaactgcaagtggatatttgatcctctctgaggatttcgttggaaacggcataaaccgcacagaactaaacagaagcattcacagaaaacacttggtgacgactgtgtttaactcacagagctgaacattcctttggatggagcagtttcgaaacacactctttgtagaatgtgcaagtggatatttgggcctctctgaggatttcgttggaaacgggataaaccgcacagaactaaaacagaagcattctcagaaactactttgtgacgattgcattcaagtcacagagttgaacattccctttgacagagcagtttggaaactctctttgtgtagaatctgcaagtggagatatggaccgctttgaggcctatggtagtaaaggtaatagcttcatatgaaagctagacagtagcattctcagaaacttctttgtgatgcttgcattcaactcacagagttgaactttcctttcgagagagaagctttgaaacactctttttccagaatctgcaagtggacatttggagggctttgaggcctgtggtggaaaaggaattaacttcccgtaaaagctagatagaagcattgtcagaaacttctttgtgatgattgcattcaactcacagagatgaaggttcctttacaaacagcagtttccaaacactctttctgtggaatctgcaagtggatatttggacctctttgaagatttcgttggaaacgggagaatcttcacagaaaagctaaacagaagcattctcagaaacttctctgtgatgtttgtgttcaactcccagagtttcacattgcttttcatagagtagttctgaaacatgcttttcgtagtgtctgcaagtggacatttggagcgctttcaggcctgtggtggaaaacgaattatggtcccataaaaactggagagaagacttctcagaaccttctctgtgatgattgcattcaactcacagatttgaaccctcctatggatagaacagtgttgaaactctctttttgtggaatctgcaagtggatatgtggacctctccgaagatgtctttggaaacgggaatatcttcacctaaaaactaaacagaagcattctcagaaacttcttggtgatgtttgcattcaaatcccagagttgaaccttcctttgagagttcaggtttgaaacactctttttgtaggatctgcaagtggatatttggaccactctgtggccttcgttcgaaacgggtacatcttcgcataaaatctagacagaagcattctcagaaaatactttgtgatgattgagttgaactcacagagttgaacattcctttggatggagcaggtttgagacacactttttgtagaatctacaaggggatatttggacctctctgaggatttcgttggaaacgggataactgcacctaactaaacggaagcattctcagaaactgctttgtgatgattgcattcacctcacagagttgaacattcctattgatagagcagtttggaaacactcttcttgtggaatgtgcaagtggagatttggagcgctttgaggcctatggtagtaaagggaatagcttcatagaaaaactagacagatgcattctcaggaactttttggtgatgtttgtattcaactcccagagttgaactttcctttggaaagagcagctatgaaacactctttttctagaatctgcaagtggacgtttggagggctttgtggtttgtggtggaaaaggaaatatcttcacctaaatactagatagaagcattctcagaagcttctctgtgatgactgcattcaactcacggagttgaacactccttttgagagcgcagttttgaaactctctttctgtggcatccgcaaggggacatgtggacctctttgaagatttcgttggaaacggaatcatcttcacataaaaactatacagaagcagtctcagaatcttctttgtgatgtttgcattcaaatcccagagttgaactttcctttcaaagttcacgtttgaaacactctttttgcaggatctacaagtggatatttggaccactctgtgtccttcgttcgaaacgggtatatcttcacatgacatctagacagaagctttctcagaaaattctttgggatgattgagttgaactcacagagctgaacattccttgcgatggagcagtttagaaacacactttctgcagaatctgcaagtgcatatttggacctctctgaggaattcgttggaaacgggataatttcagctgactaaacagaagcattctcagaatcttcttcgtgatgtctgcattcaactcacagtgtggcacctttctttgatagttcaggtttgaaacactctttttgtagaaactgcaaggggataattgcacttctttgaggcctaccgtagtaaaggaaataacttcctatacaaagaagatagaagcattctcagaaccctcttcgtgatgtttgcattcaacacacagtgctgaaccttttctttgatagttcagctttgaaacactctttttgtagaaactgcaagtggatatttggtcctctctgaggatttcgttggaaacgtgataaaccgcacagaactaaacagaagcattcacagaaaactcttggtgacgactgagtttaactcacagagctgaacattcctttggatggagcagtttcgaaacacactctttgtagaatctgcaagtggatatttgggcctctctaaggatttcgttggaaatgggataaaccgcacagaactaaaacaaaagcattctgagaaactactttgtgatgattgcattcaagtcacagagctgaacattccctttgacagagcagttaggaaactctctttgtgtagaatctgcaagtggagatatggaatgctttgaggactatggtagtaaaggaaatagcttcatataaaagctagacagtagcattctcagaaacttctttgtgatgcttgcattcaactcacagagttgaactttcctttcgagagagaagctttgaaacactctttttccagaatctgcaagtggacatttggagggctttgaggcctgtggtggaaaaggaattatcttcccgtaaaagctggatagaagcattgtcagaaacttctttgtgatgattgcattcaactcacagagttgaaggttccttttcaaacagcagtttccaaacactctttctgtggaatctgcaagtggatgtttggacctctttgaagatttcgttggaaacgggataaccttcacagaaaagctaaacagaagcattctcagaaacttctctgtgatgtttgtgttcaactcccagagtgtcacattgcttctcatagagtagttctgaaacatgcttttcgtagtgtctgcaagtggacatttggagcgctttcaggcctgtggtggaaaacgaattatggtcacataaaaactggacagaagccttctcagaaacttctctgtgatgattgcattcaactcacagagttgaaccctcctatggatagagcagtgttgaaactctctttttgtggaatctgcaagtggatatgtggacctctccgaagatgtgtttggaaacgggactatcttcacataaaaactaaacagaagcattctcagaaacttcttggtgatgtttgcattcaaatcccagagttgaaccttcctttgatagttcaggtttgaaacactctttttgtaggatctgcaattggctatttggaccactctgtggccttcgttcgaaacgggtatatcttcgcataaaatctagacagaagcattctcagaaaatactttgtgatgattgagttgaactcacagagctgaacattcctttggatggagcaggtttgagacacactttttgtagaatctacaagtggatatttggacctctctgaggatttcgttggaaacgggataactgcacttaactaaacggaagcattctcagaaactgctttgtgatgattgcattcacctcacagagttgaacattcctattgatagagcagtttggaaacactcttgttgtggaatgtgcaagtggagatttggagcgctttgaggcctatggtagtaaagggaatagcttcatagaaaaactagacagatgcattctcaggaactttttggtgatgtttgtattcaactcccacagttgaactttcctttggaaagagcagctatgaaacactctttttctagaatctgcaagcggacgtttggagggctttgtggtttgtggtggaaaaggaaatatcttcacctaaatactagacagaagcattctcagaaacttttctgtgatgactgcattcaactcacagagttgaacactccttttgagagcgcagttttgaaactctctttctgtggaatctgcaaggggacatgtagacctctttgaaggtttcgttggaaacagaatcatcttcacataaaaattacacggaagcagtctcagaatcttctttgtgatgtttgcattcaaatcacagagttgaactttcctttcaaagttcacgtttgaaacactctttttgcaggatctacaagtggatatttggaccactctgtgtccttcgttcgaaacgggtatatcttcacatgacatctagacagaagctttctcagaaaattctttgggatgattgagttgaactcacagagctgaacattccttgcgatgtagcagtttagaaacacactttctgcagaatctgcaagtgcatatttggacctctctgaggaattcgttggaaacgggataatttcagctgactaaacagaagcattctcagaaccttcttcgtgatgtctgcattcaactcacagtgtggaacctttctttgatagttcaggtttgaaacactctttttgtagaaactgcaaggggataattgcacttctttgaggcctaccgtagtaaaggaaataacttcctatagaaagaagacagaagcattctcagaaccctcgtcgtgatgtttgcattcaactcacagtgctgaacctttctttgatagttcagctttgaaacactcttcttgtagaaactgcaagtggatatttggtcctctctgaggatttcgttggaaacgggaaaaaccgcacagaactaaacagaagcattctcaggaaccttcttcgtgatgtttgcattcaactcacagtgttgaacctttctttgatagttcaggtttgaaacggtctttctgtagaaactgcaagtagatatttggacctctctgaggatttcgttggaaacgggataacccgcacagaactaaaacagaagcattcacagaaaactcttggtgacgactgagtttaactcacagagctgaacattcctttggatggagcagttttgaaacacactatttgtagaatgtgcaagtggatatttgggcctctctgaggatttcgttggaaacgggataaaccgcacagaactaaacagaagcattctcagaaactactttgtgatgattgcattcaagtcacagagttgaacattccctttgagagagcagtttggaaactctctttgtgtagaatctgcaagtggagatatggaccgcgttgaggcctatggtagtaaaggaaatagcttcatataaaagctagacagtagcattctcagaaacttctttgtgatgcttgcattcaactcacagagttgaactttcctttcgagagagaagctttgaaacactctttttccagaatctgcaagtggacatttggagggctttgaggcctgtggtggaaaaggaattatcttcccgtaaaagctagatagaagcattgtcagaaacttctttgtgatgattgcattcaactcacagagttgaaggttccttttcaaacagcagtttccaatcactctttctgtggaatctgcaggtggatatttggaccgctttgaagatttcgttggaaacgggagaatcttcacagaaaagctaaacagaagcattctcagaaacttctctgtgatgtttgtgttcaactcccagagtttcacattgcttttcatagagtagttctgaaacatgcttttcgtagtgtctgcaagtggacatttggagagctttcaggcctgtggtggaaaacgaattatggtcacataaaaactggagagaagccttctcagaaacttctctgtgatgattgcattcaactcacagagttgaaccctcctatggacagagcagtgttgaaactctctttttgtggaatctgcaagtggatatgtggacctctccgaagatgtctttggaaacgggaatatcttcacataaaaactaaacagaagcattctcagaaacttcttggtgatgtttgcattcaaatcccagagttgaaccttcctttgatagttcaggtttgaaacactctttttgtaggatctgcaagtggctatttggaccactctgtggccttcgttcgaaacgggtatatcttcgcataaaatctagacagaagcattctcagaaaatactttgtgatgattgagttgaactcacagagctgaacattcctttggatggagcaggtttgagacacactttttgtagaatctacaagtggatatttggacctctctgaggatttcgttggaaacgggataactgcacctaactaaacggaagcattctcagaaactgctttgtgatgattgcattcacctcacagagttgaacattcctattgatagagcagtttggaaacactcttgttgtggaatgtgcaagtggagatttggagcgctttgaggcctatggtagtaaagggaatagcttcatagaaaaactagacagatgcattctcaggaactttttggtgatgtttgtattcaactcccagagttgaactttcctttggaaagagcagctatgaaacactctttttctagaatcttcaagtggacgtttggagggctttgtggtttgtggtggaaaaggaaatatcttcacctaaatactagatagaagcattctcagaagcttctctgtgatgactgcattcaactcacggagttgaacactccttttgagagcgcagttttgaaactctctttctgtggcatctgcaaggggacatgtagacctctttgaagatttcgttggaaacggaatcatcttcacataaaaactatacagaagcagtctcagaatcttctttgtgatgtttgcattcaaatcccagagttgaacttgcctttcaaagttcacgtttgaaacactctttttgcaggatctacaagtggatatttggaccactctgtgtccttcgttcgaaacgggtatatcttcacatgacatctagacagaagctttctcagaaaattctttgggatgattgagtggaactcacagagctgaacattccttgcgatgtagcagtttagaaacacactttctgcagaatctgcaagtgcatatttggacctctctgaggaattcgttggaaacgggataatttcagctgactaaacagaagcattctcagaaccttcttcgtgatgtctgcattcaactcacagtgtggaacctttctttgatagttcaggtttgaaacactctttttgtagaaactgcaaggggataattgcacttctttgaggcctaccgtagtaaaggaaataacttcctatagaaagaagacagaagcattctcagaaccctcttcgtgatgtttgcattcaactcacagtgctgaacctttctttgatagttcagctttgaaacactcttcttgtagaaactgcaagtggatatttggtcctctctgaggatttcgttggaaacgggataaaccgcacagaactaaacagaagcattctcaggaaccttcttcgtgatgtttgcattcaactcacagtgttgaacctttctttgatagttcaggtttgaaacggtctttctgtagaaactgcaagtagatatttggacctctctgaggatttcgttggaaacgggataacccgcacagaactaaaacagaagcattcacagaaaactcttggtgacgactgagtttaactcacagagctgaacattcctttggatggagcagtttcgaaacacactatttgtagaatctgcaagtggatatttgggcctctctgaggatttcgttggaaacgggataaaccgcacagaactaaaacagaagcattctcagaaactactttgtgatgattgcattcaagtcacagagttgaacattccctttgacagagcagtttggaaactctctttgtgtagaatctgcaagtggagatatggaccgctttgaggcctatggtagtaaaggaaatagcttcatataaaagctagacagtagcattctcagcaaacttctttgtgatgcttgcattcaactcacagagttgaactttcctttcgagagagaagctttgaaacactctttttccagaatctgcaagtggacatttggagggctttgaggcctgtggtggaaaaggaattatcttcccgtaaaagctagatagaagcattgtcagaaacttctttgtgatgattgcattcaactcacagagatgaaggttcctttacaaacagcagtttccaaacactctttctgtggaatctgcaagtggatatttggacctctttgaagatttcgttggaaacgggagaatcttcacagaaaagctaaacagaagcattctcagaaacttctctgtgatgtttgtgttcaactcccagagtgtcacattgcttctcatagagtagttctgaaacatgcttttcgtagtgcctgcaaggggacatttggagcgctttcaggcctgtggtggaaaacgaattatggtcacataaaaactggagagaagccttctcagaaacttctctgtgatgattgcattcaactcacagagttgaaccctcctatggatagagcagtgttgaaactctctttttgtggaatctgcaagtgtatatgtggacctctccgaagatgtctttggaaacgggactatcttcacataaaaactaaacagaagcattctcagaaacttcttggtgatgtttgcattcaaatcccaaagttgaaccttcttttgagagttcaggtttgaaacactctttttgtaggatctgcaagtggatatttggaccactctgtggccttcgttcgaaacgggtacatcttcgcataaaatctagacagaagcattctcagaaaatactttgtgatgattgagtttaactcacagagctgaacattcctttggatggagcaggtttgagacacaccttttgtagaatctacaagtggatatttggacctctctgaggatttcgttggaaacgggataactgcacctaactaaacggaagcattctcagaaactgctttgtgatgattgcattcacctcacagagttgaacattcctattgatagagcagtttggaaacactcttgttgtggaatgtgcaagtggagatttggagcgctttgaggcctatggtagtaaagggaatagcttcatagaaaaactagacagatgcattctcaggaactttttggtgatgtttgtattcaactcccagagttgaactttcctttggaaagagcagctatgaaacactgtttttctagaatctgcaagtggacgtttggagggctttgtggtttgtggtggaaaaggaaatatcttcacctaaatactagatagaagcatcctcagaagcttctctgtgatgactgcattcaactcacggagttgaacactccttttgagagcgcagttttgaaactctctttctgtggcatctgcaaggggacatgtagacctctttgaagatttcgttggaaacggaatcatcttcacataaaaactatacagaagcagtctcagaatcttctttgtgatgtttgcattcaaatccccgagttgaactttcctttcaaagttcacgtttgaaacactctttttgcaggatctacaagtggatatttggaccactctgtgtccttcgttcgaaacgggtatatcttcacatgacatctagacagaagctttctcagaaaattctttgggatgattgagttgaactcacagagctgagcattccttgcgatgtagcagtttagaaacacactttctgcagaatctgcaagtgcatatttggacctctgtgaggaattcgttggaaacgggataatttcagctgactaaacagaagcattctcagaaccttcttcgtgatgtctgcattcaactcacagtgtggaacctttctttgatagttcaggtttgaaacactctttctgtagaaactgcaaggggataattgcactctttgaggagtaccgtagtaaaggaaataacttcctataaaaagaagacagaagcattctcagaaccctcttcgtgatgtttgcattcaactcacagtgctgaacctttctttgatagttcagctttgaaacactctttttgtagaaactgcaagtggatatttggtcctctctgagcatttcgttggaaacgggataaactgcacagaactaaacagaagcattctgagaaccttcttcgtgatgtttgcattcaactcacagtgttgaacctttctttgatagttcaggtttgaaacggtctttctgtagaaactgcaagtagatatttggacctctctgaggatttcgttggaaacgggataacccgcacagaactaaaacagaagcattcacagaaaactcttggtgacgactgagtttaactcacagagctgaacattcctttggatggagcagttttgaaacacactatttgtagaatgtgcaagtggatatttaggcctctctgaggatttcgttggaaacgggataaaccgcacagaactaaacagaagcattctcagaaactactttgtgatgattgcattcaagtcacagagttgaacattccctttgacagagcagtttggaaactctctttgtgtagaatctgcaagtggagatatggaccgctttgaggcctatggtagtaaaggaaatagcttcatataaaagctagacagtagcattctcagaaacttctttgtgatgcttgcattcaactcacagagttgaactttcctttcgagagagaagctttgaaacactctttttccagaatgtgcaagtggacatttggggagctttgaggcctgtggaggaaaaggaatcatcttcccgtaaaagctagatagaagcattgtcagaaacttctttgtgatgattgcattcaactcacagagttgaaggttccttttcaaacagcagtttccaatcactctttctgtggaatctgcaagtggatatttcgacctctttgaagatttcgttggaaacgggagaatcttcacagaaaagctaaacagaagcattctcagaaacttctctgtgatgtttgtgttcaactcccagagtttcacgttgcttttcatagagtagttctgaaacatgcttttcgtagtgtctgcaagtggacatttggagcgctttcaggcctgtggtggaaaacgaattatggtcacataaaaactggagagaagccttctcagaaacttctctgtgatgattgcattcaactcacagagttgaaccctcctatggatagagcagtgttgaaactctctttttgtggaatctgcaagtggatatgtggagctctccgaagatgtctttggaaacgggaatatcttcacataaaaactaaacagaagcattctcagaaacttcttggtgatgtttgcattcaaatcccagaggtgaaccttcctttgatagttcaggtttgaaacactctttttgtaggatctgcaagtggctatttggaccactctgtggccttcgttcgaaacgggtatatcttcgcataaaatctagacagaagcattctcagaaaatactttgtgatgattgagttgaactcacagagctgaacattcctttggatggagcaggtttgagacacactttttgtagaatctacaagtggatatttggacctctctgaggatttcgttggaaacgggataactgcacctaactaaacggaagcattctcagaaactgctttgtgatgattgcattcacctcacagagttgaacattcctattgatagagcagtttggaaacactcttgttgtggaatgtgcaagtggagatttggagcgctttgaggcctatggtagtaaagggaatagcttcatagaaaaactagacagatgcattctcaggaactttttggtgatgtttgtattcaactcccagagttgaactttcctttggaaagagcagctatgaaacactctttttctagaatctgcaagtggacgtttggagggctttgtggtttgtggtggaaaaggaaatatcttcacctaaatactagatagaagcattctcagaagcttctctgtgatgactgcattcaactcacggagttgaacactccttttgagagcgcagttttgaaactctctttctgtggcatctgcaaggggacatgtagacctctttgaagatttcgttggaaacggaatcatcttcacataaaaactatacagaagcagtctcagaatcttctttgtgatgtttgcattcaaatcccagagttgaactttcctttcaaagttcacgtttgaaacactctttttgcaggatctacaagtggatatttggaccactctgtgtccttcgttcgaaacgggtatatcttcacacgacatctagacagaagctttctcagaaaattctttgggatgattgagtggaactcacagagctgaacattccttgcgatgtagcagtttagaaacacactttctgcagaatctgcaagtgcatatttggacctctctgaggaattcgttggaaacgggataatttcagctgactaaacagaagcattctcagaaccttcttcgtgatgtctgcattcaactcacagtgtggaacctttctttgatagttcaggtttgaaacactctttttgtagaaactgcaaggggataattgcacttctttgaggcctaccgtagtaaaggaaataacttcctatagaaagaagacagaagcattctcagaaccctcttcgtgatgtttgcattcaactcacagtgctgaacctttctttgatagttcagctttgaaacactcttcttgtagaaactgcaagtggatatttggtcctctctgaggatttcgttggaaacgggataaaccgcacagaactaaacagaagcattctcagagccctcttcgtgatgtttgcattcaactcacagtgctgaacctttctttgatagtgcagctttgaaacactctttttgtagaaactgcaagtggatgtttggtcctctctgaggatttcgttggaaacgggataaaccgcacagaactaaaacagaagcattgtcagaaacttctttgtgatgattgcattcaactcacagagttgaaggttccttttcaaacagcagtttccaatcactctttctgtggaatctgcaagtggatatttgggcctctctgaggatttcgttggaaacgggataaaacgcacagaactaaaacagaagcattctcagaaacttctctgtgatgtttgtgttcaactcccagagtttcacattgcttttcatagagtagttctgaaacatgcttttcgtagtgtctacaagtggacatttggagcgctttcaggcctgtggtggaaaacgaattatggtcacataaaaactggagagaagccttctcagaaacttctctgtgatgattgcattcaactcacagagttgaaccctcctatggatagagcagtgttgaaactctctttttgtggaacctgcaagtggatatgtggacctctccgaagatgtctttggaaacgggaatatcttcacataaaaactaaacagaagcattctcagaaacttcttggtgatgtttgcattcaaatcccagagttgaaccttcctttgatagttcaggtttgaaacactctttctgtaggatctgcaagtggctatttggaccactctgtggccttcgttcgaaacgggtatatcttcgcataaaatctagacagaagcattctcagaaaatactttgtgatgattgagtttaaatcacagagctgaccattcctttggatggagcaggtttgagacacactttttgtagaatctacaagtggatatttggacctctctgaggatttcgttggaaacgggataactgcacctaactaaacggaagcattctcagaaactgctttgtgatgattgcattcacctcacagagttgaacattcctattgatagagcagtttggaaacactcttgttgtggaatgtgcaagtggagatttggagcgctttgaggcctatggtagtaaagggaataccttcatagaaaaactagacagatgcattctcaggaactttttggtgatgtttgtattcaactcccagagttgaactttcctttggaaagagcagctatgaaacactctttttctagaatctgcaagtggacgtttggagggctttgtggtttgtggtggaaaaggaaatatcttcacctaaatactagatagaagcattctcagaagcttctctgtgatgactgcattcaactcacgggagttgaacactccttttgagagcgcagttttgaaactctctttctgtggcatccgcaaggggacatgtggacctctttgaagatttcgttggaaacggaatcatcttcacatcaaaactatacagaagcagtctcagaatcttctttgtgatgtttgcattcaaatcccagagttgaactttcctttcaaagttcacgtttgaaacactctttttgcaggatctacaagtggatatttggaccactctgtgtccttcgttcgaaacgggtatatcttcacacgacatctagacagaagctttctcagaaaattctttgggatgattgagtggaactcacagagctgaacattccttgcgatgtagcagtttagaaacacactttctgcagaatctgcaagtgcatatttggacctctgtgaggaattcgttggaaacgggataatttcagctgactaaacagaagcattctcagaaccttcttcgtgatgtctgcattcaactcacagtgtggaacctttctttgatagttcaggtttgaaacactctttttgtagaaactgcaaggggataattgcacttctttgaggcctaccgtagtaaaggaaataacttcctatagaaagaagacagaagcattctcagaaccctcttcgtgatgtttgcattcaactcacagtgctgaacctttctttgatagttcagctttgaaacactcttcttgtagaaactgcaagtggatatttggtcctctctgaggatttcgttggaaacgggataaaccgcacagaactaaacagaagaattctcagagccctcttcgtgatgtttgcattcaactcacagtgctgaacctttctttgatagtgcagctttgaaacactctttttgtagaaactgcaagtggatgtttggtcctctctgaggatttcgttggaaacgggataaaccgcacagaactaaaacagaagcattgtcagaaacttctttgtgatgattgcattcaactcacagagttgaaggttccttttcaaacagcagtttccaatcactctttctgtggaatctgcaagtggatatttgggcctctctgaggatttcgttggaaacgggataaaacgcacagaactaaaacagaagcattctcagaaacttctctgtgatgtttgtgttcaactcccagagtttcacgttgcttttcatagagtagttctgaaacatgcttttcgtagtgtctgcaagtggacatttggagcgctttcaggcctgtggtggaaaacgaattatggtcacataaaaactggagagaagccttctcagaaacttctctgtgatgattgcattcaactcacagagttgaaccctcctatggatagagcagtgttgaaactctctttttgtggaacctgcaagtggatatgtggacctctccgaagatgtctttggaaacgggaatatcttcacataaaaactaaacagaagcattctcagaaacttcttggtgatgtttgcattcaaatcccagagttgaaccttcctttgatagttcaggtttgaaacactctttctgtaggatctgcaagtggctatttggaccactctgtggccttcgttcgaaacgggtatatcttcgcataaaatctagacagaagcattctcagaaaatactttgtgatgattgagtttaaatcacagagctgaccattcctttggatggagcaggtttgagacacactttttgtagaatctacaagtggatatttggacctctctgaggatttcgttggaaacgggataactgcacctaactaaacggaagcattctcagaaactgctttgtgatgattgcattcacctcacagagttgaacattcctattgatagagcagtttggaaacactcttgttgtggaatgtgcaagtggagatttggagcgctttgaggcctatggtagtaaagggaatagcttcatagaaaaactagacagatgcattctcaggaactttttggtgatgtttgtattcaactcccagagttgaactttcctttggaaagagcagctatgaaacactctttttctagaatctgcaagtggacgtttggagggctttgtggtttgtggtggaaaaggaaatatcttcacctaaatactagatagaagcattctcagaagcttctctgcgatgactgcattcaactcacggagttgaacactccttttgagagcgcagttttgaaactctctttctgtggcatctgcaaggggacatgtagacctctttgaagatttcgttggaaacggaatcatcttcacataaaaactatacagaagcagtctcagaatcttctttgtgatgtttgcattcaaatcccagagttgaactttcgtttcaaagttcacgtttgaaacactctttttgcaggatctacaagtggatatttggaccactctgtgtccttcgttcgaaacgggtatgtcttcacatgacatctagacagaagctttctcagaaaattctttgggatgattgagtggaactcacagagctgaacattccttgcgatgtagcagtttagaaacacactttctgcagaatctgcaagttcatatttggacctctctgaggaattctttggaaacgggataatttcagctgactaaacagaagcattctcagaaccttcttcgtgatgtctgcattcaactcacagtgtggaacctttctttgatagttcaggtttgaaacactctttttgtagaaactgcaaggggataattgcacttctttgaggcctaccgtagtaaaggaaataacttcctatagaaagaagacagaagcattctcagaaccctcttcgtgatgtttgcattcaactcacagtgctgaacctttctttgatagttcagctttgaaacactcttcttgtagaaactgcaagtggatatttggtcctctctgaggatttcgttggaaacgggataaactgcacagaactaaacagaagaattctcagagccctcttcgtgatgtttgcattcaactcacagtgctgaacctttctttgatagtgcagctttgaaacactctttttgtagaaactgcaagtggatgtttggtcctctctgaggatttcgttggaaacgggataaaccgcacagaactaaaacagaagcattgtcagaaacttctttgtgatgattgcattcaactcacagagttgaaggttccttttcaaacagcagtttccaatcactctttctgtggaatctgcaagtggatatttgggcctctctgaggatttcgttggaaacgggataaaacgcacagaactaaaacagaagcattctcagaaacttctctgtgatgtttgtgttcaactcccagagtttcacgttgcttttcatagagtagttctgaaacatgcttttcgtagtgtctgcaagtggacatttggagcgctttcaggcctgtggtggaaaacgaattatggtcacataaaaactggagagaagccttctcagaaacttctctgtgatgattgcattcaactcacagagttgaaccctcccatggatagagcagtgttgaaactctctttttgtggaatctgcaagtggatatgtggacctctccgaagatgtctttggaaacgggaatatcttcacataaaaactaaacagaagcattctcagaaacttcttggtgatgtttgcattcaaatcccagagttgaaccttcctttgatagttcaggtttgaaacactctttctgtaggatctgcaagtggctatttggaccactctgtggccttcgttcgaaacgggtatatcttcgcataaaatctagacagaagcattctcagaaaatactttgtgatgattgagtttaaatcacagagctgaccattcctttggatggagcaggtttgagacacactttttgtagaatctacaagtggatatttggacctctctgaggatttcgttggaaacgggataactgcacctaactaaacggaagcattctcagaaactgctttgtgatgattgcattcacctcacagagttgaacattcctattgatagagcagtttggaaacactcttgttgtggaatgtgcaagtggagatttggagcgctttgaggcctatggtagtaaagggaatagcttcatagaaaaactagacagatgcattctcaggaactttttggtgatgtttgtattcaactcccagagttgaactttcctttggaaagagcagctatgaaacactctttttctagaatctgcaagtggacgtttggagggctttgtggtttgtggtggaaaaggaaatatcttcacctaaatactagatagaagctttctcagaagcttctctgtgatgactgcattcaactcacggagttgaacactccttttgagagcgcagttttgaaactccctttctgtggcatctgcaaggggacatgtagacctctttgaagatttcgttggaaacggaatcatcttcacataaaaactatacagaagcagtctcagaatcttctttgtgatgtttgcattcaaatcccagagttgaactttcctttcaaagttcacgtttgaaacactctttttgcaggatctacaagtggatatttggaccactctgtgtccttcgttcgaaacgggtatatcttcacacgacatctagacagaagctttctcagaaaattctttgggatgattgagttgaactcacagagctgaacattccttgcgatgtagcagtttagaaacacactttctgcagaatctgcaagtgcatatttggacctctctgaggaattcgttggaaacgggataatttcagctgactaaacagaagcattctcagaaccttcttcgtgatgtctgcattcaactcacagtgtggaacctttctttgatagttcaggtttgaaacactctttttgtagaaactgcaaggggataattgcacttctttgaggcctaccgtagtaaaggaaataacttcctataaaaagaagacagaagcattctcagaaccctcttcgtgatgtttgcattcaactcacagtgctgagcctttcttcgatagttcagctttgaaacactctttttgtagaaactgcaagtggatatttggtcctctctgaggatttcgttggaaaagggataaaccgcacagaactaaacagaagaattctcagagccctcttcgtgatgtttgcattcaactcacagtgctgaacctttctttgatagtgcagctttgaaacactctttttgtagaaactgcaagtggatgtttggtcctctctgaggatttcgttggaaacgggataaaccgcacagaactaaaacagaagcattgtcagaaacttctttgtgatgattgcattcaactcacagagttgaaggttccttttcaaacagcagtttccaatcactctttctgtggaatctgcaagtggatatttgggcctctctgaggatttcgttggaaacgggataaaacgcacagaactaaaacagaagcattctcagaaacttctctgtgatgtttgtgttcaactcccagagtttcacgttgcttttcatagagtagttctgaaacatgcttttcgtagtgtctgcaagtggacatttggagcgctttcaggcctgtggtggaaaacgaattatggtcacataaaaactggagagaagccttctcagaaacttctctgtgatgattgcattcaactcacagagttgaaccctcctatggatagagcagtgttgaaactctctttttgtggaatctgcaagtggatatgtggacctctccgaagatgtctttggaaacgggtatatcttcacataaaaactaaacagaagcattctcagaaacttcttggtgatgtttgcattcaaatcccagagttgaaccttcctttgatagttcaggtttgaaacactctttctgtaggatctgcaagtggctatttggaccactctgtggccttcgttcgaaacgggtatatcttcgcataaaatctagacagaagcattctcagaaaatactttgtgatgattgagtttaaatcacagagctgaccattcctttggatggagcaggtttgagacacactttttgtagaatctacaagtggatatttggacctctctgaggatttcgttggaaacgggataactgcacctaactaaacggaggcattctcagaaactgctttgtgatgattgcattcacctcacagagttgaacattcctattgatagagcagtttggaaacactcttgttgtggaatgtgcaagtggagatttggagcgctttgaggcctgtggtagtaaagggaatagcttcatagaaaaactagacagatgcattctcaggaactttttggtgatgtttgtattcaactcccagagttgaactttcctttggaaagagcagctatgaaacactctttttctagaatctgcaagtggacgtttggagggctttgtggtttgtggtggaaaaggaaatatcttcacctaaatactagatagaagcattctcagaagcttctctgtgatgactgcattcaactcacggagttgaacactccttttgagagtgcagttttgaaactctctttctgtggcatctgcaaggggacatgtagacctctttgaagatttcgttggaaacggaatcatcttcacatcaaaactatacagaagcagtctcagaatcttctttgtgatgtttgcattcaaatcccagagttgaactttcctttcaaagttcacgtttgaaacactctttttgcaggatctacaagtggatatttggaccactctgtgtccttcgttcgaaacgggtatatcttcacatgacatctagacagaagctttctcagaaaattctttgggatgattgagtggaactcaacagagctgaacattccttgcgatgtagcagtttagaaacacactttctgcagaatctgcaagtgcatatttggacctctctgaggaattcgttggaaacgggataatttcagctgactaaacagaagcattctcagaaccttcttcgtgatgtctgcattcaactcacagtgtggaacctttctttgatagttcaggtttgaaacactctttttgtagaaactgcaaggggataattgcacttctttgaggcctaccgtagtaaaggaaataacttcctatagaaagaagacagaagcattctcagaaccctcttcgtgatgtttgcattcaacccacggtgctgaacctttctttgatagttcagctttgaaacactctttttgtagaaactgcaagtggatatttggtcctctctgaggatttcattggaaacgggataaaccgcacagaactaaacagaagcattctcagaaccttcttcgtgatgtttgcattcaactcacagtgttgaacctttctttgatagttcaggtttgaaacggtctttctgtagaaactgcaagtagatatttggacctctctgaggatttcgttggaaacgggataaaccgcacagaactaaaacagaagcattcacagaaaactcttggtgacgactgagtttaactcacagagctgaacattcctttggatggagcagtttcgaaacacactatttgtagaatgtgcaagtggatatttgggcctctctgaggatttcgttggaaacaggataaaccgcacagaactaaacagaagcattctcagaaactactttgtgatgattgcattcaagtcacagagttgaacattccctttgacagagcagtttggaaactctctttgtgtagaatctgcaagtggagatatggacagctttgaggcctatggtagtaaaggaaatagcttcatataaaagctagacagtagcattctcagaaacttctttgtgatgcttgcattcaactcacagagttgaactttcctttcgagagagtagctttgaaacactcttttccagaatctgcaagtggacatttggagggctttgaggcctgtggtggaaaaggaattatcttcccgtaaaagctagacagaagcattgtcagaaacttctttgtgatgattgcattcaactcacagagatgaaggttcctttacaaacagcagtttccaaacactctttctgtggaatctgcaagtggatatttggacctctttgaagatttcgttggaaacgggagaatcttcacagaaaagctaaacagaagcattctcagaaacttctctgtgatgtttgtgttcaactcgcagagtttcacattgcttttcatagagtagttctgaaacatgcttttcgtagtgtctgcaagtggacatttggagcgctttcaggcctgtggtggaaaacgaattatggtcccataaaaactggagagaagccttctcagaaacttctctgtgatgattgcattcaactcacagagttgaaccctcctatggatagagcattgttgaaactctctttttgtggaatctgcaagtggatatgtggacctctccgaagatgtctttggaaacgggaatatcttcacataaaaactaaacagaagcattctcagaaacttcttggtgatgtttgcattcaaatcccagagttgaaccttcctttgatagttcaggtttgaaacactctttttgtaggatctgcaagtggatatttggaccactctgtggccttcgttcgaaacgggtatatcttcgcataaaatctagacagaagcattctcagaaaatactttgtgatgattgagtttaactcacagagctgaacattcctttggatggagcaggtttgagacacactttttgtagaaactacaagtggatatttggacctctctgaggatttcgttggaaacgcgataactgcacctaattaaacggaagcattctcagaaactgctttgtgatgattgcattcacctcacagagttgaacattcctattgatagagcagtttggaaacactcttgttgtggaatgtgcaagtggagacttggagcgttttgaggcctatggtagtaaagggaatagcttcatagaaaaactagacagatgcattctcaggaactttttggtgatgtttgtattcaactcccagagttgaactttcctttggaaagagcagctatgaaacactctttttctagaatctgcaagtggacgtttggagggctttgtggtttgtggtggaaaaggaaatatcttcacctaaatactagatagaagcattctcagaagcttctctgtgatgactgcattcaactcacggagttgaacactccttttgagagcgcagttttgaaactctctttctgtggcatctgcaaggggacatgtagacctctttgaagatttcgttggaaacggaatcatcttcacataaaaactatacagaagcagtctcagaatcttctttgtgatgtttgcattcaaatcccagagttgaactttcctttcaaagttcacgtttgaaacactctttttgcaggatctacaagtggatatttggaccactctgtgtccttcgttcgaaacgggtatatctttcacacgacatctagacagaagctttctcagaaaattctttgggatgattgagtggaactcacagagctgaacattccttgcgatgtagcagtttagaaacacactttctgcagaatctgcaagtgcatatttggacctctctgaggaattcgttggaaacgggataatttcagctgactaaacagaagcattctcagaaccttcttcgtgatgtctgcattcaactcacagtgtggaacctttctttgatagttcaggtttgaaacactctttttgtagaaactgcaaggggataattgcacttctttgaggcctaccgtagtaaaggaaataacttcctatagaaagaagacagaagcattctcagaaccctcttcgtgatgtttgcattcaactcacagtgctgaacctttctttgatagttcagctttgaaacactcttcttgtagaaactgcaagtggatatttggtcctctctgaggatttcgttggaaacgggataaaccgcacagaactaaacagaagaattctcagagccctcttcgtgatgtttgcattcaactcacagtgctgaacctttctttgatagtgcagctttgaaacactctttttgtagaaactgcaagtggatgtttggtcctctctgaggatttcgttggaaacgggataaaccgcacagaactaaaacagaagcattgtcagaaacttctttgtgatgattgcattcaactcacagagttgaaggttccttttcaaacagcagtttccaatcactctttctgtggaatctgcaagtggatatttgggcctctctgaggatttcgttggaaacgggataaaacgcacagaactaaaacagaagcattctcagaaacttctctgtgatgtttgtgttcaactcccagagtttcacgttgcttttcatagagtagttctgaaacatgcttttcgtagtgtctgcaagtggacatttggagcgctttcaggcctgtggtggaaaacgaattatggtcacataaaaactggagagaagccttctcagaaacttctctgtgatgattgcattcaactcacagagttgaaccctcctatggatagagcagtgttgaaactctctttttgtggaatctgcaagtggatatgtggacctctccgaagatgtctttggaaacgggaatatcttcacataaaaactaaacagaagcattctcagaaacttcttggtgatgtttgcattcaaatcccagagttgaaccttcctttgatagttcaggtttgaaacactctttctgtaggatctgcaagtggctatttggaccactctgtggccttcgttcgaaacgggtatatcttcgcataaaatctagacagaagcattctcagaaaatactttgtgatgattgagtttaaatcacagagctgaccattcctttggatggagcaggtttgagacacactttttgtagaatctacaagtggatatttggacctctctgaggatttcgttggaaacgggataactgcacctaactaaacggaagcattctcagaaactgctttgtgatgattgcattcacctcacagagttgaacattcctattgatagagcagtttggaaacactcttgttgtggaatgtgcaagtggagatttggagcgctttgaggcctatggtagtaaagggaatagcttcatagaaaaactagacagaatgcattctcaggaactttttggtgatgtttgtattcaactcccagagttgaactttcctttggaaagagcagctatgaagcactctttttctagaatctgcaagtggacgtttggagggctttgtggtttgtggtggaaaaggaaatatcttcacctaaatactagagagaagcattctcagaagcttctctgtgatgactgcattcaactcacggagttgaacactccttttgagagcgcagttttgaaactctccttctgtggcattcgcaaggggacatgtagacctctttgaagatttcgttggaaacggaatcatcttcacataaaaactatacagaagcagtctcagaatcttctttgtgatgtttgcattcaaatcccagagttgaactttcctttcaaagttcacgtttgaaacactctttttgcaggatctacaagtggatatttggaccactctgtgtccttcgttcgaaacgggtatatcttcacatgacatctagacagaagctttctcagaaaattctttgggatgattgagtggaactcacagagctgaacattccttgcgatgtagcagtttagaaacacactttctgcagaatctgcaagtgcatatttggacctctctgaggaattcgttggaaacgggataatttcagctgactaaacagaagcattctcagaaccttcttcgtgatgtctgcattcaactcacagtgtggaacctttctttgatagttcagctttgaaacactctttttgtagaaactgcaaggggataattgcacttctttgaggcctaccgtagtaaaggaaataacttcctatagaaagaagacaaaagcattctcagaaccctcttcgtgatgtttgcattcaactcacagtgctgaacctttctttgatagttcagctttgaaacactcttcttgtagaaactgcaagtgaatattttgtcctctctgaggatttcgttggaaacgggataaaccgcacagaactaaacggaagcattctcagaaccttcttcgtgatgtttgcattcaactcacagtgttgaaccttcctttgatagttcaggtttgaaacggtctttctgtagaaactgcaagtagatatttggacctctctgaggatttcgttggaaacgggataaaccgcacagaactaaaacagaagcattcacagaaaactcttggtgacgactgagtttaactcacagagctgaacattcctttggatggagcagtttcgaaacacactatttctagaaggtgcaagtggatatgtgggcctctctgaggatttcgttggaaacgggataaaccgcacagaactaaacagaagcattctcagaaactactttgtgatgattgcattcaagtcacagagttgaacattccctttgacagagcagtttggaaactctctttgtgtagaatctgcaagtggagatatggaatgatttgaggactatggtagtaaaggaaatagcttcatataaaagctagacagtagcattctcagaaacttctttgtgatgcttgcattcaactcactgagttgaactttcctttcgagagagaagctttgaaacactctttttccagaatctgcaagtggacatttggagggctttgaggtctgtggtggaaaaggaattatcttcccgtaaaagctagatagaagcattgtcagaaacttctttgtgatgattgcattcaactcacagagttgaaggttccttttcaaagagcagtttccaatcactctttctgtggaatctgcaagtggatatttggacctattttgaagatttcgttggaaacgggagaatcatcacaggaaagctaaacagaagcattctcagaaacttctctgtgatgtttgtgttcaactcccagagtttcacgttgcttttcatagagtagttctgaaacatgcttttcgtagtgtctgcaagtggacatttggagcgctttcaggcctgtggtggaaaacgaattatggtcacataaaaactggagagaagccttctcagaaacttctctgtgatgattgcattcaactcacagagttgaaccctcctatggatagagcagtgttgaaactctctttttgtggaatctgcaagtggatatgtggacctctccgaagatgtctttggaaacgggaatatcttcacataaaaactaaacagaagcattctcagaaacttcttggtgatgtttgcattcaaatcccagagttgaaccttcctttgatagttcaggtttgaaacactctttttgtaggatctgcaagtggctatttggaccactctgtggccttcgttcgaaacgggtatatcttcgcataaaatctagacagaagcattctcagaaaatactttgtgatgattgagtttaaatcacagagctgaacattcctttggatggagcaggtttgagacacactttttgtagaatctacaagtggatatttggacctctctgaggatttcgttggaaacgggataactgcacctaactaaacggaagcattctcagaaactgctttgtgatgattgcattcacctcacagagttgaacattcctattgatagagcagtttggaaacactcttgttgtggaatgtgcaagtggagatttggagcgctttgaggcctatggtagtaaagggaatagcttcatagaaaaactagacagatgcattctcaggaactttttggtgatgtttgtattcaactcccagagttgaactttcctttggaaagagcagctatgaaacacactttttctagaatctgcaagtggacgtttggagggctttgtggtttgtggtggaaaaggaaatatcttcacctaaatactagacagaagcattctcagaagcttctctgtgatgactgcattcaactcacggagttgaacactccttttgagagcgcagttttgaaactctctttctgtggcatctgcaaggggacatgtagacctctttgaagatttcgttggaaacggaatcatcttcacataaaaactatacagaagcagtctcagaatcttctttgtgatgtttgcattcaaatcccagagttgaactttcctttcaaagttcacgtttgaaacactctttttgcaggatctacaagtggatatttggaccactctgtgtccttcgttcgaaacgggtatatcttcacacgacatctagacagaagctttctcagaaaattctttgggatgattgagtggaactcacagagctgaacattccttgcgatgtagcagtttagaaacacactttctgcagaatctgcaagtgcatatttggacctctctgaggaattcgttggaaacgggataatttcagctgactaaacagaagcattctcagaaccttcttcgtgatgtctgcattcaactcacagtgtggaacctttctttgatagttcaggtttgaaacactctttttgtagaaactgcaaggggataattgcacttctttgaggcctaccgtagtaaaggaaataacttcctatagaaagaagacagaagcattctcagaaccctcttcgtgatgtttgcattcaactcacagtgctgaacctttctttgatagttcagctttgaaacactcttcttgtagaaactgcaagtggatatttggtcctctctgaggatttcgttggaaacgggataaaccgcacagaactaaacagaagaattctcagagccctcttcgtgatgtttgcattcaactcacagtgctgaacctttctttgatagtgcagctttgaaacactctttttgtagaaactgcaagtggatgtttggtcctctctgaggatttcgttggaaacgggataaaccgcacagaactaaaacagaagcattgtcagaaacttctttgtgatgattgcattcaactcacagagttgaaggttccttttcaaacagcagtttccaatcactctttctgtggaatctgcaagtggatatttgggcctctctgaggatttcgttggaaacgggataaaacgcacagaactaaaacagaagcattctcagaaacttctctgtgatgtttgtgttcaactcccagagtttcacgttgcttttcatagagtagttctgaaacatgcttttcgtagtgtctgcaagtggacatttggagcgctttcaggcctgtggtggaaaacgaattatggtcacataaaaactggagagaagccttctcagaaacttctctgtgatgattgcattcaactcacagagttgaaccctcctatggatagagcagtgttgaaactctctttttgtggaatctgcaagtggatatgtggacctctccgaagatgtctttggaaacgggaatatcttcacataaaaactaaacagaagcattctcagaaacttcttggtgatgtttgcattcaaatcccagagttgaaccttcctttgatagttcaggtttgaaacactctttctgtaggatctgcaagtggctatttggaccactctgtggccttcgttcgaaacgggtatatcttcgcataaaatctagacagaagcattctcagaaaatactttgtgatgattgagtttaaatcacagagctgaccattcctttggatggagcaggtttgagacacactttttgtagaatctacaagtggatatttggacctctctgaggatttcgttggaaacgggataactgcacctaactaaacggaagcattctcagaaactgctttgtgatgattgcattcacctcacagagttgaacattcctattgatagagcagtttggaaacactcttgttgtggaatgtgcaagtggagatttggagcgctttgaggcctatggtagtaaagggaatagcttcatagaaaaactagacagatgcattctcaggaaccttttggtgatgtttgtattcaactcccagagttgaactttcctttggaaagagcagctatgaaacactctttttctagaatctgcaagtggacgtttggagggctttgtggtttgtggtggaaaaggaaatatcttcacctaaatactagatagaagcattctcagaagcttctctgtgatgactgcattcaactcacggagttgaacactccttttgagagcgcagttttgaaactctctttctgtggcatctgcaaggggacatgtagacctctttgaagatttcgttggaaacggaatcatcttcacataaaaactatacagaagcagtctcagaatcttctttgtgatgtttgcattcaaatcccagagttgaactttcctttcaaagttcacgtttgaaacactctttttgcaggatctacaagtggatatttggaccactctgtgtccttcgttcgaaacgggtatatcttcacacgacatctagacagaagctttctcagaaaattctttgggatgattgagtggaactcacagagctgaacattccttgcgatggagcagtttagaaacacactttctgcagaatctgcaagtgcatatttggacctctctgaggaattcgttggaaacgggataatttcagctgactaaacagaagcattctcagaaccttcttcgtgatgtctgcattcaactcacagtgtggaacctttctttgatagttcaggtttgaaacactctttttgtagaaactgcaaggggataattgcacttctttgaggcctaccgtagtaaaggaaataacttcctatagaaagaagacagaagcattctcagaaccctcttcgtgatgtttgcattcaactcacagtgctgaacctttctttgatagttcagctttgaaacactcttcttgtagaaactgcaagtggatatttggtcctctctgaggatttcgttggaaacgggataaaccgcacagaactaaacagaagcattgtcagaaacttctttgtgatgattgcattcaactcacagagttgaaggttccttttcaaacagcagtttccaatcactctttctgtggaatctgcaagtggatatttgggcctctctgaggatttcgttggaaacgggataaaacgcacagaactaaaacagaagcattctcagaaacttctctgtgatgtttgtgttcaactcccagagtttcacgttgcttttcatagagtagttctgaaacatgcttttcgtagtgtctgcaagtggacatttggagcgctttcaggcctgtggtggaaaacgaattatggtcacataaaaactggagagaagccttctcagaaacttctctgtgattattgcattcaactcacagagttgaaccctcctatggatagagcagtgttgaaactctctttttgtggaatctgcaagtggatatgtggacctctccgaagatgtctttggaaacgggaatatcttcacataaaaactaaacagaagcattctcagaaacttcttggtgatgtttgcattcaaatcccagagttgaaccttcctttgatagttcaggtttgaaacactctttctgtaggatctgcaagtggctatttggaccactctgtggccttcgttcgaaacgggtatatcttcgcataaaatctagacagaagcattctcagaaaatactttgtgatgattgagtttaaatcacagagctgaccattcctttggatggagcaggtttgagacacactttttgtagaatctacaagtggatatttggacctctctgaggatttcgttggaaacgggataactgcacctaactaaacggaagcattctcagaaactgctttgtgatgattgcattcacctcacagagttgaaaattcctattgatagagcagtttggaaacactcttgttgtggaatgtgcaagtggagatttggagcgctttgaggcctatggtagtaaagggaatagcttcatagaaaaactagacagatgcattctcaggaactttttggtgatgtttgtattcaactcccagagttgaactttcctttggaaagagcagctatgaaacactctttttctagaatctgcaagtggacgtttggagggctttgtggtttgtggtggaaaaggaaatatcttcacctaaatactagacagaagcattctcagaagcttctctgtgatgactgcattcaactcacggagttgaacactccttttgagagcgcagttttgaaactctctttctgtggcatctgcaaggggacatgtagacctctttgaagatttcgttggaaacggaatcatcttcacataaaaactatacagaagcagtctcagaatcttctttgtgatgtttgcattcaaatcccagagttgaactttcctttcaaagttcacgtttgaaacactctttttgcaggatctacaagtggatatttggaccactctgtgtccttcgttcgaaacgggtatatcttcacacgacatctagacagaagctttctcagcaaaattctttgggatgattgagtggaactcacagagctgaacattccttgcgatgtagcagtttagaaacacactttctgcagaatctgcaagtgcatatttggacctctctgaggaattcgttggaaacgggataatttcagctgactaaacagaagcattctcagaaccttcttcgtgatgtctgcattcaactcacagtgtggaacctttctttgatagttcaggtttgaaacactctttttgtagaaactgcaaggggataatttcacttctttgaggcctaccgtagtaaaggaaataacttcctatagaaagaagacagaagcattctcagaaccctcttcgtgatgtttgcattcaactcacagtgctgaacctttctttgatagttcagctttgaaacactcttcttgtagaaactgcaagtggatatttggtcctctctgaggatttcgttggaaacgggataaaccgcacagaactaaacagaagaattctcagagccctcttcgtgatgtttgcattcaactcacagtgctgaacctttctttgatagtgcagctttgaaacactctttttgtagaaactgcaagtggatgtttggtcctctctgaggatttcgttggaaacgggataaaccgcacagaactaaaacagaagcattgtcagaaacttctttgtgatgattgcattcaactcacagtagttgaaggttccttttcaaacagcagtttccaatcactctttctgtggaatctgcaagtggatatttgggcctctctgaggatttcgttggaaacgggataaaacgcacagaactaaaacagaagcattctcagaaacttctctgtgatgtttgtgttcaactcccagagtttcacgttgcttttcatagagtagttctgaaacatgcttttcgtagtgtctgcaagtggacatttggagcgctttcaggcctgtggtggaaaacgaattatggtcacataaaaactggagagaagccttctcagaaacttctctgtgatgattgcattcaactcacagagttgaaccctcctatggatagagcagtgttgaaactctctttttgtggaatctgcaagtggatatgtggacctctccgaagatgtctttggaaacgggaatatcttcacataaaaactaaacagaagcattctcagaaacttcttggtgatgtttgcattcaaatcccagagttgaaccttcctttgatagttcaggtttgaaacactctttctgtaggatctgcaagtggctatttggaccactctgtggccttcgttcgaaacgggtatatcttcgcataaaatctagacagaagcattctcagaaaatactttgtgatgattgagtttaaatcacagagctgaccattcctttggatggagcaggtttgagacacactttttgtagaatctacaagtggatatttggacctctctgaggatttcgttggaaacgggataactgcacctaactaaacggaagcattctcagaaactgctttgtgatgattgcattcacctcacagagttgaacattcctattgatagagcagtttggaaacactcttgttgtggaatgtgcaagtggagatttggagcgctttgaggcctatgttagtaaagggaatagcttcatagaaaaactagacagatgcattctcaggaactttttggtgatgtttgtattcaactcccagagttgaactttcctttggaaagagcagctatgaaacactctttttctagaatctgcaagtggacgtttggagggctttgtggtttgtggtggaaaaggaaatatcttcacctaaatactagatagaaagcatcctcagaagcttctctgtgattactgcattcaactcacggagttgaacactccttttgagagcgcagttttgaaactctctttctgtggcatctgcaaggggacatgtagacctctttgaagatttcgttggaaacggaatcatcttcacataaaaactacacagagcagtctcagaatcttctttgtgatgtttgcattcaaatcccagagttgaactttcctttcaaagttcacgtttgaaacactctttttgcaggatctacaagtggatatttggaccactctgtgtccttcgttcgaaacgggtatatcttcacacgacatctagacagaagctttctcagaaaattctttgggatgattgagtggaactcacagagctgaacattccttgcgatgtagcagtttagaaacacactttctgcagaatctgcaagtgcatatttggacctctctgaggaattcgttggaaacgggataatttcagctgactaaacagaagcattctcagaaccttcttcgtgatgtctgcattcaactcacagtgtggaacctttctttgatagttcaggtttgaaacactctttttgtagaaactgcaaggggataattgcacttctttgaggcctaccgtagtaaaggaaataacttcctatagaaagaagacagaagcattctcagaaccctcttcgtgatgtttgcattcaactcacagtgctgaacctttctttgatagttcagctttgaaacactcttcttgtagaaactgcaagtggatatttggtcctctctgaggatttcgttggaaacgggataaaccgcacagaactaaacagaagaattctcagagccctcttcgtgatgtttgcattcaactcacagtgctgaacctttctttgatagtgcagctttgaaacactctttttgtagaaactgcaagtggatatttggtcctctctgaggatttcgttggaaacgggataaaccgcacagaactaaaacagaagcattcacagaaaactcttggtgacgactgagtttaactcacagagctgaacattcctttggatggagcagtttcgaaacacactatttgtagaatctgcaagtggatatttgggcctctctgaggatttccttggaaacgggataaaacgcacagaattaaaacagaagcattctcagaaactactttgtgatgattgcattcaagtcacagagttgaacattccctttgacagagcagtttggaaactctctttgtgtagaatctgcaagtggagatatggaccgctttgaggcctatggtagtaaaggaaatagcttcatataaaagctagacagtagcattctcagaaacttctttgtgatgcttgcattcaactcacagagttgaactttcctttcgagagagaagctttgaaacactctttttccagaatgtgcaagtggacatttggggagctttgaggcctgtggaggaaaaggaattatcttcccgtaaaagctagatagaagcattgtcagaaacttctttgagatgattgcattcaactcacagagttgaaggttccttttcaaacagcagtttccaatcactctttctgtggaatctgcaagtggatatttcgacctctttgaagatttcgttggaaacgggagaatcttcacagaaaagctaaacagaagcattctcagaaacttctctgtgatgtttgtgttcaactcccagagtttcacgttgcttttcatagagtagttctgaaacatgcttttcgtagtgtctgcaagtggacatttggagcgctttcaggcctgtggtggaaaacgaattatggtcacataaaaactggagagaagccttctcagaaacttctctgtgatgattgcattcaactcacagagttgaaccctcctatggatagagcagtgttgaaactctctttttgtggaatctgcaagtggatatgtggacctctccgaagatgtctttggaaacgggaatatcttcacataaaaactaaacagaagcattctcagaaacttcttggtgatgtttgcattcaaatcccagagttgaaccttcctttgatagttcaggtttgaaacactctttctgtaggatctgcaagtggctatttggaccactctgtggccttcgttcgaaacgggtatatcttcgcataaaatctagacagaagcattctcagaaaatactttgtgatgattgagtttaaatcacagagctgaccattcctttggatggagcaggtttgagacacactttttgtagaatctacaagtggatatttggacctctctgaggatttcgttggaaacgggataactgcacctaactaaacggaagcattctcagaaactgctttgtgatgattgtattcacctcacagagttgaacattcctattgatagagcagtttggaaacactcttgttgtggaatgtgcaagtggagatttggagcgctttgaggcctatggtagtaaagggaatagcttcatagaaaaactagacagatgcattctcaggaactttttggtgatgtttgtattcaactcccagagttgaactttcctttggaaagagcagctatgaaacactctttttctagaatctgcaagtggacgtttggagggctttgtggtttgtggtggaaaaggaaatatcttcacctaaatactagatagaagcattctcagaagcttctctgtgatgactgcattcaactcacggagttgaacactccttttgagagcgcagttttgaaactctctttctgtggcatctgcaaggggacatgtagacctctttgaagatttcgttggaaacggaatcatcttcacataaaaactatacagaagcagtctcagaatcttctttgtgatgtttgcattcaaatcccagagttgaactttcctttcaaagttcacgtttgaaacactctttttgcacgatctacaagtggatatttggaccactctgtgtccttcgttcgaaacgggtatatcttcacatgacatctagacagaagctttctcagaaaattctttgggatgattgagtggaactcacagagctgaacattccttgcgatgtagcagtttagaaacacactttctgcagaatctgcaagtgcatatttggacctctctgaggaattcgttggaaacgggataatttcagctgactaaacagaagcattctcagaaccttcttcgtgatgtctgcattcaactcacagtgtggaacctttctttgatagttcaggtttgaaacactctttttgtagaaactgcaaggggataattgcacttctttgaggcctaccgtagtaaaggaaataacttcctatagaaagaagacagaagcattctcagaaccctcttcgtgatgtttgcattcaactcacagtgctgaacctttctttgatagttcagctttgaaacactcttcttgtagaaactgcaagtggatatttggtcctctctgaggatttcgttggaaacgggataaaccgcacagaactaaacagaagcattctcagaaccttcttcgtgatgtttgcattcaactcacagtgttgaacctttctttgatagttcaggttggaaacggtctttctgtagaaactgcaagtagatatttggacctctctgaggatttcgttggaaacgggataaaccgcacagaactaaaacagaagcattcacagaaaactcttggtgacgactgagtttaactcacagagctgaacattcctttggatggagcagtttcgaaacacactatttgtagaatgtgcaagtggatatttgggcctctctgaggatttcgttggaaacgggataaaccgcacagaactaaacagaagcattctcagaaactactttgtgatgattgcattcaagtcacagagttgaacattccctttgacagagcagtttggaaactctctttgtgtagaatctgcaagtggagatatggaccgctttgaggcctatggtagtaaaggaaatagcttcatataaaagctagacagtagcattctcagaaacttctttgtgatgcttgcattcaactcacagagttgaactttcctttcgagagagaagctttgaaacactctttttccagaatctgcaagtggacatttggagggctttgaggcctgtggtggaaaaggaattatcttcccgtaaaagctagatagaagcattgtcagaaacttctttgtgatgattgcattcaactcacagagttgaaggttccttttcaaagagcagtttccaatcactctttctgtggaatctgcaagtggatatttggacctattttgaagatttcgttggaaacgggagaatcttcacaggaaagctaaacagaagcattctcagaaacttctctgtgatgtttgtgttcaactcccagagtttcacattgcttttcatagagtagttctgaaacatgcttttcgtagtgtctacaagtggacatttggagcgctttcaggcctgtggtggaaaacgaattatggtcacataaaaactggagagaagccttctcagaaacttctctgtgatgattgcattcaactcacagagttgaaccctcctatggatagagcagtgttgaaactctctttttgtggaatctgcaagtggatatgtggacctctccgaagatgtctttggaaacgggaatatcttcacataaaaactaaacagaagcattctcagaaacttcttggtgatgtttgcattcaaatcccagagttgaaccttcctttgatagttcaggtttgaaacactctttttgtaggatctgcaagtggatatttggaccactctgtggccttcgttcgaaacgggtatatcttcgcataaaatctagacagaagcattctcagaaccttcttcatgatgtttgcattcaactcacagtgttgaacctttctttgatagttcaggtttgaaacggtctttctgtagaaactgcaagtagacatttggacctctctgaggatttcgttggaaacgggataactgcacctaactaaacggaagcattcacagaaaactcttggtgacgactgagtttaactcacagagctgaacattcctttggatggagcagtttcgaaacacactatttgtagaatgtgcaagtggatatttgggcctctctgaggatttcgttggaaacgggataaaccgcacagaactaaacagaagcattctcagaaactactttgtgacgattgcattcaagtcacagagttgaacattccctttgacagagcagtttggaaactctctttgtgtagaatctgcaagtggagatatggaccgctttgaggcctatggtagtaaaggtaatagcttcatatgaaagctagacagtagcattctcagaaacttctttgtgatgcttgcattcaactcacagagttgaactttcctttcgagagagaagctttgaaacactctttttccagaatctgcaagtggacatttggagggctttgaggcctgtggtggaaaaggaattaacttcccgtaaaagctagatagaagcattgtcagaaacttctttgtgatgattgcattcaactcacagagatgaagattcctttacaaacagcagtttccaaacactctttctgtggaatctgcaagtggatatttggacctctttgaagatttcgttggaaacgggagaatcttcacagaaaagctaaacagaagcattctcagaaacttctctgtgatgtttgtgttcaactcccagagtttcacattgcttttcatagagtagttctgaaacatgcttttcgtagtgtctgcaagtggacatttggagcgctttcaggcctgtggtggaaaacgaattatggtcccataaaaactggagagaagccttctcagaaacttctctgtgatgattgcattcaactcacagagttgaaccctcctatggatagagcattgttgaaactctctttttgtggaatctgcaagtggatatgtggacctctccgaagatgtctttggaaacgggaatatcttcacataaaaactaaacagaagcattctcagaaacttcttggtgatgtttgcattcaaatcccagagttgaaccttcctttgatagttcaggtttgaaacactctttttgtacgatctgcaagtggatatttggaccattctgtggccttcgttcaaaacgggtacatcttcgcataaaatctagacagaagcattctcagaaaatactttgtgatgattgagtttaactcacagagctgaacattcctttggatggagcaggtttgagacacactttttgtagaaactacaagtggatatttggacctctctgaggatttcgttggaaacgcgataactgcacctaattaaacggaagcattctcagaaactgctttgtgatgattgcattcacctcacagagttgaacattcctattgatagagcagtttggaaacactcttgttgtggaatgtgcaagtggagacttggagcattttgaggcctatggtagtaaagggaatagcttcatagaaaaactagacagatgcattctcaggaactttttggtgatgtttgtattcaactcccagagttgaactttcctttggaaagagcagctatgaaacactctttttctagaatctgctagtggacgtttggagggctttgtggtttgtggtggaaaaggaaatatcttcacctaaatactagatagaagcatcctcagaagcttctctgtgatgactgcattcaactcacggagttgaacactccttttgagagcgcagttttgaaactctctttctgtggcatctgcaaggggacatgtagacctctttgaagatttcgttggaaacggaatcatcttcacataaaaactatacagaagcagtctcagaatcttctttgtgatgtttgcattcaaatccccgagttgaactttcctttcaaagttcacgtttgaaacactctttttgcaggatctacaagtggatatttggaccactctgtgtccttcgttcgaaacgggtatatcttcacatgacatctagacagaagctttctcagaaaattctttgggatgattgagttgaactcacagagctgagcattccttgcgatgtagcagtttagaaacacactttctgcagaatctgcaagtgcatatttggacctctgtgaggaattcgttggaaacgggataatttcagctgactaaacagaagcattctcagaaccttcttcgtgatgtctgcattcaactcacagtgtggaacctttctttgatagttcaggtttgaaacactctttttgtagaaactgcaaggggataattgcactctttgaggagtaccgtagtaaaggaaataacttcctataaaaagaagacagaagcattctcagaaccctcttcgtgatgtttgcattcaactcacagtgctgaacctttctttgatagttcagctttgaaacactctttttgtagaaactgcaagtggatatttggtcctctctgagcatttcgttggaaacgggataaactgcacagaactaaacagaagcattctcagaaccttcttcgtgatgtttgcattcaactcacagtgttgaacctttctttgatagttcaggtttgaaacggtctttctgtagaaactgcaagtagatatttggacctctctgaggatttcgttggaaacgggataacccgcacagaactaaaacagaagcattcacagaaaactcttggtgacgactgagtttaaatcacagagctgaacattcctttggatggagcagtttcgaaacacactatttctagaaggtgcaagtggatatgtgggcctctctgaggatttcgttggaaacgggataaaccgcacagaactaaacagaagcattctcagaaactactttgtgatgattgcattcaagtcacagagttgaacattccctttgacagagcagtttggaaactctctttgtgtagaatctgcaagtggagatatggaccgctttgaggcctatggtagtaaaggaaatagcttcatataaaagctagacagtagcattctcagaaacttctttgtgatgcttgcattcaactcacagagttgaactttcctttcgagagagaagctttgaaacactctttttccagaatctgcaagtggacatttggagggctttgaggcctgtggtggaaaaggaattatcttcccgtaaaagctagatagaagcattgtcagaaacttctttgtgatgattgcatacaagtcacagagttgaaggttccttttcaaagagcagtttccaatcactctttctgtggaatctgcaagtggatatttggacctctttgaagatttcgttggaaacgggagaatcttcacagaaaagctaaacagaagcattctcagaaacttctctgtgatgtttgtgttcaactcccagagtttcacattgcttttcatagagtagttctgaaacatgcttttcgtagtgtctgcaagtggacatttggagcgctttcaggcctgtggtggaaaacgaattatggtcacataaaaactggagagaagccttctcagaaacttctctgtgatgattgcattcaactcacagagttgaaccctcctatggatagagcagtgttgaaactctctttttgtggaatctgcaagcggatatgtggacctctccgaagatgtctttggaaacgggaatatcttcacataaaaactaaacagaagcattctcagaaacttcttcgtgatgtttgcattcaaatcccagagttgaaccttcctttgagagttcaggtttgaaacactctttttgtaggatctgcaagtggatatttggaccactctgtggccttcgttcgaaacgggtacatcttcgcataaaatctagacagaagcattctcagaaaatactttgtgatgattgagttgaactcacagagctgaacattcctttggatggagcaggtttgagacacactttttgtagaatctacaagtggatatttggacctctctgaggatttcgttggaaacgggataactgcacctaactaaacggaagcattctcagaaactgctttgtgatgattgcattcacctcacagagttgaacattcctattgatagagcagtttggaaacactcttcttgtggaatgtgcaagtggagatttggagcgctttgaggcctatggtagtaaagggaatagcttcatagaaaaactagacagatgcattctcaggaactttttggtgatgtttgtattcaactcccagagttgaactttcctttggaaagagcagctatgaaacactctttttctagaatctgcaagtggacgtttggagggctttgtggtttgtggtggaaaaggaaatatcttcacctaaatactagatagaagcattctcagaagcttctctgtgatgactgcattcaactcacggagttgaacactccttttgagagcgcagttttgaaactctctttctgtggcatctgcaaggggacatgtagacctctttgaagatttcgttggaaacggaatcatcttcacataaaaactatacagaagcagtctcagaatcttctttgtgatgtttgcattcaaatcccagagttgaactttcctttcaaagttcacgtttgaaacactctttttgcaggatctacaagtggatatttggaccactctgtgtccttcgttcgaaacgggtatatcttcacacgacatctagacagaagctttctcagaaaattctttgggatgattgagtggaactcacagagctgaacattccttgcgatgtagcagtttagaaacacactttctgcagaatctgcaagtgcatatttggacctctctgaggaattcgttggaaacgggataatttcagctgactaaacagaagcattctcagaaccttcttcgtgatgtctgcattcaactcacagtgtggaacctttctttgatagttcaggtttgaaacactctttttgtagaaactgcaaggggataattgcacttctttgaggcctaccgtagtaaaggaaataacttcctatagaaagaagacagaagaattctcagagccctcttcgtgatgtttgcattcaactcacagtgctgaacctttctttgatagtgcagctttgaaacactctttttgtagaaactgcaagtggatgtttggtcctctctgaggatttcgttggaaaccgggataaaccgcacagaactaaaacagaagcattgtcagaaacttctttgtgatgattgcattcaactcacagagttgaaggttccttttcaaacagcagtttccaatcactctttctgtggaatctgcaagtggatatttgggcctctctgaggatttcgttggaaacgggataaaacgcacagaactaaaacagaagcattctcagaaacttctctgtgatgtttgtgttcaactcccagagtttcacgttgcttttcatagagtagttctgaaacatgcttttcgtagtgtctgcaagtggacatttggagcgctttcaggcctgtggtggaaaacgaattatggtcacataaaaactggagagaagccttctcagaaacttctctgtgatgattgcattcaactcacagagttgaaccctccctatggatagagcagtgttgaaactctctttttgtggaatctgcaagtggatatgtggacctctccgaagatgtctttggaaacgggaatatcttcacataaaaactaaacagaagcattctcagaaacttcttggtgatgtttgcattcaaatcccagagttgaaccttcctttgagagttcaggtttgaaacactctttttgtaggatctgaaagtggatatttggaccactctgtggccttcgttcgaaacgggtacatcttcgcataaaatctagacagaagcattctgagaaaatactttgtgatgattgagttgaactcacagagctgaacattcctttggatggagcaggtttgagacacactttttgtagaatctacaagtggatatatggacctctctgaggatttcgttggaaacgggataactgcacctaactaaacggaagcattctcagaaactgctttgtgatgattgcattcacctcacagagttgaacattcctattgatagagcagtttggaaacactcttgttgtggaatgtgcaagtggagatttggagcgctttgaggcctatggtagtaaagggaatagcttcatagaaaaactagacagatgcattctcaggaactttttggtgatgtttgtattcaactcccagagttgaactttcctttggaaagagcagctatgaaacactgtttctctagaatctgcaagtggacgtttggagggctttgtggtttgtggtggaaaaggaaatatcttcacctaaatactagatagaagcattctcagaagcttctctgtgatgactgcattcaactcacggagttcaacactccttttgagagcgcagttttgaaactctctttctgtggcatctgcaaggggacatgtagacctctttgaagatttcgttggaaacggaatcatcttcacataaaaactatacagaagcagtctcagaatcttctttgtgatgtttgcattcaaatcccagagttgaactttcctttcaaagttcacgtttgaaacactctttttgcaggatctacaagtggatatttggaccactctgtgtccttcgttcgaaacgggtatatcttcacatgacatctagacagaagctttctcagaaaattctttgggatgattgagtggaactcacagagctgaacattccttgcgatgtagcagtttagaaacacactttctgcagaatctgcaagtgcatatttggacctctccgaggaattcgttggaaacgggataatttcagctgactaaacagaagcattctcagaaccttcttcgtgatgtctgcattcaactcacagtgtggaacctttctttgatagttcaggtttgaaacactctttttgtagaaactgcaaggggataatggcacttctttgaggcctaccgtagtaaaggaaataacttcctatagaaagaagacagaagcattctcagaaccctcttcgtgatgtttgcattcaactcacagtgctgaacctttctttgatagttcagctttgaaacactcttcttgtagaaactgcaagtggatttttggtcctctctgaggatttcgttggaaacgggataaaccgcacagaactaaacagaagaattctcagagccctcttcgtgatgtttgcattcaactcacagtgctgaacctttctttgatagtgcagctttgaaacactctttttgtagaaactgcaagtggatatttggtcctctctgaggatttcgttggaaacgggataaaccgcacagaactaaaacagaagcattcacagaaaactcttggtgacgactgagtttaactcacagagctgaacattcctttggatggagcagtttcgaaacacactatttgtagaatctgcaagtggatatttgggcctctctgaggatttcgttggaaacgggataaaccgcacagaactaaaacagaagcattctcagaaactactttgtgatgattgcattcaagtcacagagttgaacattccctttgacagagcagtttggaaactctctttgtgtagaatctgcaagtggagatatggaccgcgttgaggcctatggtagtaaaggaaatagcttcatataaaagctagacagtagcattctcagaaacttctttgtgatgcttgcattcaactcacagagttgaactttcctttcgagagagaagctttgaaacactctttttccagaatctgcaagtggacatttggagggctttgaggcctgtggtggaaaaggaattatcttcccgtaaaagctagatagaagcattgtcagaaacttctttgtgatgattgcattcaactcacagagttgaaggttccttttcaaagagcagtttccaatcactctttctgtggaatatgcaagtggatatttggacctattttgaagatttcgttggaaacgggagaatcttcacagaaaagctaaacagaagcattctcagaaacttctctgtgatgtttgtgttcaactcccagtgtttcacattgcttttcatagagtagttctgaaacatgcttttcgtagtgtctacaagtggacatttggagcgctttcaggcctgtggtggaaaacgaattatggtcacataaaaactggagagaagccttctcagaaacttctctgtgatgattgcattcaactcacagagttgaaccctcctatggatagagcagtgttgaaactctctttttgtgtaatctgcaagtggatatgtggacctcgccgtagatgtctttggaaacgggaatatcttcacataaaaactatacagaagcattctcagaaacttcttggtgatgtttgcattcaaatcccagagttgaaccttcctttgatagttcaggtttgaaacactctttttgtaggatctgcaagtggatatttggaccactctgtggccttcgttcgaaacgggtatatcttcgcataaaatctagacagaagcattctcagaaaatactttgtgatgattgagtttaactcacagagctgaacattcctttggatggagcaggtttgagacacactttttgtagaatctacaagtggatatttggacctctctgaggatttcgttggaaacgggataactgcacctaactaaacggaagcattctcagaaactgctttgtgatgattgcattcacctcacagagttgaacattactattgatagagcagtttggaaacactcttgttgtggaatgtgcaagtggagatttggagcgctttgtggcctatggtagtaaagggaatagcttcatagaaaaactagacagatgcattctcaggaactttttggtgatgtttgtattcaactcccagagttgaactttcctttggaaagagcagctatgaaacactctttttctagaatctgcaagtggacgtttggagggctttgtggtttgtggtggaaaaggaaatatcttcacctaaatcctagagagaagcattctcagaagcttctctgtgatgactgcattcaactcacggagttgaacactccttttgagagcgcagttttgaaactctctttctgtggcatctgcaaggggacatgtagacctctttgaagatttcgatggaaacggaatcatcttcacataaaaactatacagaagcagtctcagaatcttctttgtgatgtttgcattcaaatcccagagttgaactttcctttcaaagttcacgtttgaaacactctttttgcaggatctacaagtggatatttggaccactctgtgtccttcgttcgaaacgggtatatcttcacatgacatctagacagaagctttctcagaaaattctttgggatgattgagttgaactcacagagctgagcattccttgcgatgtagcagtttagaaacacactttctgcagaatctgcaagtgcatatttggacctctctgaggaattcgttggaaacgggataatttcagctgactaaacagaagcattctcagaaccttcttcgtgatgtctgcattcaactcacagtgtggaacctttctttgatagttcaggtttgaaacactctttttgtagaaactgcaaggggatcattgcactctttgaggagtaccgtagtaaaggaaataacttcctataaaaagaagacagaagcattctcagaaccctcttcgtgatgtttgcattcaactcacagtgctgaacctttctttgatagttcagctttgaaacactctttttgtagaaactgcaagtggatatttggtcctctctgagcatttcgttggaaacgggataaactgcacagaactaaacagaagcattctcagaaaatactttgtgatgattgagtttaactcacagagctgaacattcctttggatggagcaggtttgagacacactttttgtagaatctacaagtggatatttggacctctctgaggatttcgttggaaacgggataacccgcacagaactaaaacagaagcattctcagaaactgctttgtgatgattgcattcacctcacagagttgaacattcctattgatagagcagtttggaaacactcttgttgtggaatgtgcaagtggagatttggagcgctttgaggcctatggtagtaaagggaatagcttcatagaaaaactagacagatgcattctcaggaactttttggtgatgtttgtattcaactcccagagttgaactttcctttggaaagagcagctatgaaacactgtttttctagaatctgcaagtggacgtttggagggctttgtggtttgtggtggaaaaggaaatatcttcacctaaatactagatagaagcattctcagaagcttctctgtgatgactgcattcaactcacggagttgaacactccttttgagagcgtagttttgaaactctctttctgtggcatctgcaaggggacatgtagacctctttgaagatttcgttggaaacggaatcatcttcacataaaaactatacagaagcagtctcagaatcttctttgtgatgtttgcattcaaatcccagagttgaactttcctttcaaagttcacgtttgaaacactctttttgcaggatctacaagtggatatttggaccactctgtgtccttctttcgaaacgggtatatcttcacatgacatctagacagaagctttctcagaaaattctttgggatgattgagtggaactcacagagctgaacattccttgcgatgtagcagtttagaaacacactttctgcagaatctgcaagtgcatatttggacctctctgaggaattcgttggaaacgggataatttcagctgactaaacagaagcattctcagaaccttcttcgtgatgtctgcattcaactcacagtgtggaacctttctttgatagttcaggtttgaaacactctttttgtagaaactgcaaggggataattgcacttctttgaggcctaccgtagtaaaggaaataacttcctatagaaagaagacagaagcattctcagaaccctcttcgtgatgtttgcattcaactcacagtgctgaacctttctttgatagttcagctttgaaacactctttttgtagaaactgcaagtggatatttggtcctctctgaggatttcgttggaaacgggataaaccgcacagaactaaacagaagaattctcagagccctcttcgtgatgtttgcattcaactcacagtgctgaacctttctttgatagtgcagctttgaaacactctttttgtagaaactgcaagtggatgtttggtcctctctgaggatttcgttggaaacgggataaaccgcacagaactaaaacagaagcattgtcagaaacttctttgtgatgattgcattcaactcacagagttgaaggttccttttcaaacagcagtttccaatcactctttctgtggaatctgcaagtggatatttgggcctctctgaggatttcgttggaaacgggataaaacgcacagaactaaaacagaagcattctcagaaacttctctgtgatgtttgtgttcaactcccagagtttcacgttgcttttcatagagtagttctgaaacatgcttttcgtagtgtctgcaagtggacatttggagcgctttcaggcctgtggtggaaaacgaattatggtcacataaaaactggagagaagccttctcagaaacttctctgtgatgattgcattcaactcacagagttgaaccctcctatggatagagcagtgttgaaactctctttttgtggaatctgcaagtggatatgtggacctctccgaagatgtctttggaaacgggaatatcttcacataaaaactaaacagaagcattctcagaaacttcttggtgatgtttgcattcaaatcccagagttgaaccttcctttgatagttcaggtttgaaacactctttctgtaggatctgcaagtggctatttggaccactctgtggccttcgttcgaaatgggtatatcttcgcataaaatctagacagaagcattctcagaaaatactttgtgatgattgagtttaaatcacagagctgaccattcctttggatggagcaggtttgagacacactttttgtagaatctacaagtggatatttggacctctctgaggatttcgttggaaacgggataactgcacctaactaaacggaagcattctcagaaactgctttgtgatgattgcattcacctcacagagttgaccattcctattgatagagcagtttggaaacactcttgttgtggaatgtgcaagtggagatttggagcgctttgaggcctatggtagtaaagggaatagcttcatagaaaaactagacagatgcattctcaggaactttttggtgatgtttgtattcaactcccagagttgaactttcctttggaaagagcagctatgaaacaccctttttctagaatctgcaagtggacgtttggagggctttgtggtttgtggtggaaaaggaaatatcttcacctaaatactagacagaagcattctcagaagcttctctgtgatgactgcattcaactcacggagttgaacactccttttgagagcgcagttttgaaactctctttctgtggcatctgcaaggggacatgtagacctctttgaagatttcgttggaaacggaatcatcttcacataaaaactatacagaagcagtctcagaatcttctttgtgatgtttgcattcaaatcccagagttgaactttcctttcaaagttcacgtttgaaacactctttttgcaggatctacaagtggatatttggaccactctgtgtccttcgttcgaaacgggtatatcttcacacgacatctagacagaagctttctcagaaaattctttgggatgattgagtggaactcacagagctgaacattccttgcgatgtagcagtttagaaacacactttctgcagaatctgcaagtgcatatttggacctctctgaggaattcgttggaaacgggataatttcagctgactaaacagaagcattctcagaaccttcttcgtgatgtctgcattcaactcacagtgtggaacctttctttgatagttcaggtttgaaacactctttttgtagaaactgcaaggggataattgcacttctttgaggcctaccgtagtaaaggaaataacttcctatagaaagaagacagaagcattctcagaaccctcttcgtgatgtttgcattcaactcacagtgctgaacctttctttgatagttcagctttgaaacactcttcttgtagaaactgcaagtggatatttggtcctctctgaggatttcgttggaaacgggataaaccgcacagaactaaacagaagaattctcagagccctcttcgtgatgtttgcattcaactcacagtgctgaacctttctttgatagtgcagctttgaaacactctttttgtagaaactgcaagtggatgtttggtcctctctgaggatttcgttggaaacgggataaaccgcacagaactaaaacagaagcattgtcagaaacttctttgtgatgattgcattcaactcacagagttgaaggttccttttcaaacagcagtttccaatcactctttctgtggaatctgcaagtggatatttgggcctctctgaggatttcgttggaaacgggataaaacgcacagaactaaaacagaagcattctcagaaacttctctgtgatgtttgtgttcaactcccagagtttcacgttgcttttcatagagtagttctgaaacatgcttttcgtagtgtctgcaagtggacatttggagcgctttcaggcctgtggtggaaaacgaattatggtcacataaaaactggagagaagccttctcagaaacttctctgtgatgattgcattcaactcacagagttgaaccctcctatggatagagcagtgttgaaactctctttttgtggaacctgcaagtggatatgtggacctctccgaagatgtctttggaaacgggaatatcttcacataaaaactaaacagaagcattctcagaaacttcttggtgatgtttgcattcaaatcccagagttgaaccttcctttgatagttcaggtttgaaacactgtttctgtaggatctgcaagtggctatttggaccactctgtggccttcgttcgaaacgggtatatcttcgcataaaatctagacagaagcattctcagaaaatactttgtgatgattgagtttaactcacagagctgaacattcctttggatggagcaggtttgagacacacatttgtagaatctacaagtggatatttggacctctctgaggatttcgttggaaacgcgataactgcccctaactaaacggaagcattctcagaaactgctttgtgatgattgcattcacctcacagagttgaacattcctattgatagagcagtttggaaaccctcttgttgtggaatgtgcaagtggagatttggagcgctttgaggcctatggtagtaaagggaatagcttcatagaaaaactagacagatgcattctcaggaactttttggtgatgtttgtattcaactcccagagttgaactttcctttggaaagagcagctatgaaacactctttttctagaatctgcaagtggacgtttggagggctttgtggtttgtggtggaaaaggaaatatcttcacctaaatactagatagaagcattctcagaagcttctctgtgatgactgcattcaactcacggagttgaacactccttttgagagcgcagttttgaaactctctttctgtggcatctgcaaggggacatgtagacctctttgaagatttcgttggaaacggaatcatcttcacataaaaactatacagaagcagtctcagaatcttctttgtgatgtttgcattcaaatcccagagttgaactttcctttcaaagttcacgtttgaaacactctttttgcaggatctacaagtggatatttggaccactctgtgtccttcgttcgaaacgggtatatcttcacatgacatctagacagaagctttctcagaaaattctttgggatgattgagtggaactcacagagctgaacattccttgcgatgtagcagtttagaaacacactttctgcagaatctgcaagtgcatatttggatctctctgaggaattcgttggaaacgggataatttcagctgactaaacagaagcattctcagaacgttcttcgtgatgtctgcattcaactcacagtgtggaacctttctttgatagttcaggtttgaaacactctttttgtagaaactgcaaggggataattgcactgctttgaggcctaccgtagtaaaggaaataacttcctataaaaagaagacagaagcattctcagaaccctcttcgtgatgtttgcattcaactcacagtgctgaacctttctttgatagttcagctttgaaacactcttcttgtagaaactgcaagtggatatttggtcctctctgaggatttcgttggaaacgggataaaccgcacagaactaaacagaagaattctcagagccctcttcgtgatgtttgcattcaactcacagtgctgaacctttctttgatagtgcagctttgaaacactctttttgtagaaactgcaagtggatgtttggtcctctctgaggatttcgttggaaacgggataaaccgcacagaactaaaacagaagcattgtcagaaacttctttgtgatgattgcattcaactcacagagttgaaggttccttttcaaacagcagtttccaatcactctttctgtggaatctgcaagtggatattagggcctctctgaggatttcgttggaaacgggataaaacgcacagaactaaaacagaagcattctcagaaacttctctgtgatgtttgtgttcaactcccagagtttcacgttgcttttcatagagtagttctgaaacatgcttttcgtagtgtctgcaagtggacatttggagcgctttcaggcctgtggtggaaaacgaattatggtcacataaaaactggagagaagccttctcagaaacttctctgtgatgattgcattcaactcacagagttgaaccctcctatggatagagcagtgttgaaactctctttttgtggaatctgcaagtggatatgtggacctctccgaagatgtctttggaaacgggaatatcttcacataaaaactaaacagaagcattctcagaaacttcttggtgatgtttgcattcaaatcccagagttgaaccttcctttgatagttcaggtttgaaacactctttttgtaggatctgcaattggctatttggaccactctgtggccttcattcgaaacgggtatatcttcgcataaaatctagacagaagcattctcagaaaatactttgtgatgattgagtttaaatcacagagctgaccattcctttggatggagcaggtttgagacacactttttgtagaatctacaagtggatatttggacctctctgaggatttcgttggaaacgggataactgcacctaactaaacggaagcattctcagaaactgctttgtgatgattgcattcacctcacagagttgaacattcctattgatagagcagtttggaaacactcttgttgtggaatgtgcaagtggagatttggagcgctttgaggcctgtggtagtaaagggaatagcttcatagaaaaactagacagaatgcattctcaggaactttttggtgatgtttgtattcaactcccagagttgaactttcctttggaaagagcagctatgaaacactctttttctagaatctgcaagtggacgtttggagggctttgtggtttgtggtggaaaaggaaatatcttcacctaaatactagacagaagcattctcagaagcttctctgtgatgactgcattcaactcacggagttgaacactccttttgagagcgcagttttgaaactctctttctgtggcatctgcaaggggacatgtagacctctttgaagatttcgttggaaacggaatcatcttcacataaaactatacagaagcagtctcagaatcttctttgtgatgtttgcattcaaatcccagagttgaactttcctttcaaagttcacgtttgaaacactctttttgcaggatctacaagtggatatttggaccactctgtgtccttcgttcgaaacgggtatatcttcacacgacatctagacagaagctttctcagaaaattctttgggatgattgagtggaactcacagagctgaacattccttgcgatgtagcagtttagaaacacactttctgcagaatctgcaagtgcatatttggacctctctgaggaattcgttggaaacgggataatttcagctgactaaacagaagcattctcagaaccttcttcgtgatgtctgcattcaactcacagtgtggaacctttctttgatagttcaggtttgaaacactctttttgtagaaactgcaaggggataattgcacttctttgaggcctaccgtagtaaaggaaataacttcctatagaaagaagacagaagcattctcagaaccctcttcgtgatgtttgcattcaactcacagtgctgaacctttctttgatagttcagctttgaaacactcttcttgtagaaactgcaagtggatatttggtcctctctgaggatttcgttggaaacgggataaaccgcagagaactaaacagaagcattctcagaatcttcttcgtgatgattgcattcaactcacagtgttgaacctttctttgatagttcaggttggaaacggtctttctgtagaaactgcaagtagatatttggacctcctctgaggatttcgttggaaacgggataaaccgcacagaactaaaacagaagcattcacagaaaactcttggtgacgactgagtttaactcacagagctgaacattcctttggatggagcagtttcgaaacacactatttgtagaatctgcaagtggatatttgagcctactctgaggatttcgatggaaacgggataaaacgcacagaactaaaacagaagcattctcagaaactactttgtgatgattgcattcaagtcacagagttgaacattccctttgacagagcagtttggaaactctctttgtgtagaatctgcaagtggagatatggaccgctttgaggcctatggtagtaaaggaaatagcttcatataaaagctagacagtagcattctcagaaacttctttgtgatgcttgcattcaactcacagagttgaactttcctttcgagagagaagctttgaaacactctttttccagaatgtgcaagtggacatttggggagctttgaggcctgtggtggaaaaggaattatcttcccgtaaaagctagatagaagcattgtcagaaacttctttgtgatgattgcattcaactcacagagttgaaggttccttttcaaagagcagtttccaatcactctttctgtggaatctgcaagtggatatttcgacctctttgaagatttcgttggaaacgggagaatcttcacagaaaagctaaacagaagcattctcagaaacttctctgtgatgtttgtgttcaactcccagagtttcacattgcttctcatagagtagttctgaaacatgcttttcgtagtgtctgcaagtggacatttggagcgctttcaggcctgtggtggaaaacgaatatggtcacataaaaactggagagaagccttctcagaaacttctctgtgatgattgcattcaactcacagagttgaaccctcctatggatagagcagtgttgaaactctctttttgtggaatctgcaagtggatacgtggacctctccgaagatgtctttggaaacgggaatatcttcacataaaaactaaacagaagcattctcagaaacttcttggtgatgtttgcattcaaatcccagagttgaaccttcctttgatagttcaggtttgaaacactctttttgtaggatctgcaagtggatatttggaccactctgtggccttcgttcgaaacgggtatatcttcgcataaaatctagacagaagcattctcagaaaatactttgtgatgattgagtttaactcacagagctgaacattcctttggatggagcaggtttgagacacactttttgtagaatctacaagtggatatttggacctctctgaggatttcgttggaaacgggataactgcacctaactaaacggaagcattctcagaaactgctttgtgatgattgcattcacctcacagagttgaacattcctattgatagagcagtttggaaacactcttgttgtggaatttgcaagtggagatttggagcgctttgaggcctatggtagtaaagggaatagcttcatagaaaaactagacagatgcattctcaggaactttttggtgatgtttgtattcaactcccagagttgaactttcctttggaaagagcagctatgaaacactctttttctagaatctgcaagtggacgtttggagggctttgtggtttgtggtggaaaaggaaatatcttcacctaaatactagatagaagcattctcagaagcttctctgtgatgactgcattcaactcacggagttgaacactccttttgagagcgcagttttgaaactctctttctgtggcatctgcaaggggacatgtagacctctttgaagatttcgttggaaacggaatcatcttcacataaaaactatacagaagcagtctcagaatcttctttgtgatgtttgcattcaaatcccagagttgaactttcgtttcaaatttcacgtttgaaacactctttttgcaggatctacaagtggatatttggaccactctgtgtccttcgttcgaaacgggtatatcttcacatgacgtctagacagaagctttctcagaaaattctttgggatgattgagtggaactcacagagctgaacattccttgcgatgtagcagtttagaaacacactttctgcagaatctgcaagtgcatatttggacctctctgaggaattcgttggaaacgggataatttcagctgactaaacagaagcattctcagaaccttcttcgtgatgtctgcattcaactcacagtgtggaacctttctttgatagttcaggtttgaaacactctttttgtagaaactgcaaggggataattgcacttctttgaggcctaccgtagtaaaggaaataacttcctatagaaagaagacagaagcattctcagaaccctcttcgtgatgtttgcattcaactcacagtgctgaacctttctttgatagttcagctttgaaacactcttcttgtagaaactgcaagtggatatttggtcctctctgaggatttcgttggaaacgggataaaccgcacagaactaaacagaagaattctcagagccctcttcgtgatgtttgcattcaactcacagtgctgaacctttctttgatagtgcagctttgaaacactctttttgtagaaactgcaagtggatgtttggtcctctctgaggatttcgttggaaacgggataaaccgcacagaactaaaacagaagcattgtcagaaacttctttgtgatgattgcattcaactcacagagttgaaggttccttttcaaacagcagtttccaatcactctttctgtggaatctgcaagtggatatttgggcctctctgaggatttcgttggaaacgggataaaacgcacagaactaaaacagaagcattctcagaaacttctctgtgatgtttgtgttcaactcccagagtttcacgttgcttttcatagagtagttctgaaacatgcttttcgtagtgtctgcaagtggacatttggagcgctttcaggcctgtggtggaaaacgaattatggtcacataaaaactggagagaagccttctcagaaacttctctgtgatgattgcattcaactcacagagttgaaccctcctatggatagagcagtgttgaaactctctttttgtggaatctgcaagtggatatgtggacctctccgaagatgtctttggaaacgggaatatcttcacataaaaactaaacagaagcattctcagaaacttcttggtgatgtttgcattcaaatcccagagttgaaccttcctttgatagttcaggtttgaaacactctttttgtaggatctgcaagtggatatttggaccactctgtggccttcgttcgaaacgggtacatcttcgcataaaatctagacagaagcattctcagaaaatactttgtgatgattgagtttaactcacagagctgaacattcctttggatggagcaggtttgagacacaccttttgtagaatctacaagtggatatttggacctctctgaggatttcgttggaaacgggataactgcacctaactaaacggaagcattctcagaaactgctttgtgatgattgcattcacctcacagagttgaacattcctattgatagagcagtttggaaacactcttgttgtggaatgtgcaagtggagatttggagcgctttgaggcctatggtagtaaagggaatagcttcatagaaaaactagacagatgcattctcaggaactttttggtgatgtttgtattcaactcccagagttgaactttcctttggaaagagcagctatgaaacactctttttctagaatctgcaagtggacgtttggagggctttgtggtttgtggtggaaaaggaaatatcttcacctaaatactagatagaagcattctcagaagcttctctgtgatgactgcattcaactcacggagttgaacactccttttgagagcgcagttttgaaactctctttctgtggcatctgcaaggggacatgtagacctctttgaagatttcgttggaaacggaatcatcttcacataaaaactatacagaagcagtctcagaatcttctttgtgatgtttgcattcaaatcccagagttgaactttcctttcaaagttcacgtttgaaacactctttttgcaggatctacaagtggatatttggaccactctgtgtccttcgttcgaaacgggtatatcttcacacgacatctagacagaagctttctcagaaaattctttgggatgattgagtggaactcacagagctgaacattccttgcgatgtagcagtttagaaacacactttctgcagaatctgcaagtgcatatttggacctctctgaggaattcgttggaaacgggataatttcagctgactaaacagaagcattctcagaaccttcttcgtgatgtctgcattcaactcacagtgtggaacctttctttgatagttcaggtttgaaacactctttttgtagaaactgcaaggggataattgcacttctttgaggcctaccgtagtaaaggaaataacttcctatagaaagaagacagaagcattctcagaaccctcttcgtgatgtttgcattcaactcacagtgctgaacctttctttgatagttcagctttgaaacactcttcttgtagaaactgcaagtggatatttggtcctctctgaggatttcgttggaaacgggataaaccgcacagaactaaacagatagcattcacagtaaaactcttggtgacgactgagtttaactcacagagctgaacattcctttggatggagcagtttcgaaacacactatttgtagaatctgcaagtggatatttgggcctctctgaggatttcgttggaaacgggataaaacgcacagaactaaaacagaagcattctcagaaactactttgtgatgattgcattcaagtcacagagttgaacattccctttgacagagcagtttggaaactctctttgtgtagaatctgcaagtggagatatggaccgctttgaggcctatggtagtaaaggaaatagcttcatataaaagctagacagtagcattctcagaaacttctttgtgatgcttgcattcaactcacagagttgaactttcctttcgagagagaagctttgaaacactctttttccagaatctgcaagtggacatttggagggctttgaggcctgtggtggaaaaggaattatcttcccgtaaaagctagatagaagcattgtcagaaacttcctttgtgatgattgcattcaacacacagagttgaaggttccttttcaaagagcagtttccaatcactctttctgtggaatctgaaagtggatatttggacctctttgaagatttcgttggaaacgggagaatcttcacagaaaagctaaacagaagcattctcagaaacttctctgtgatgtttgtgttcaactcccagagtttcacattgcttttcatagagtagttctgaaacatgcttttcgtagtgtctgcaagtggacatttggagcgctttcaggcctgtggtggaaaacgaattatggtcacataaaaactggagagaagccttctcagaaacttctctgtgatgattgcattcaactcacggagttgaaccctcctatggacagagcagtgttgaaactctctttttgtggaatctgcaagtggatatgtggacctctccgaagatgtctttggaaacgggaatatcttcacataaaaactaaacagaagcattctcagaaacttcttggtgatgtttgcattcaaatcccagagttgaaacttcctttgataggtcaggtttgaaacactctttctgtacgatctgcaagtggatatttggaccactctgtggccttcgttcgaaacgggtacatcttcacataacatctagacagaagcattctcagaaaatactttgtgatgattgagtttaaatcacagagctgaccattcctttggatggagcaggtttgagacacactttttgtagaatctacaagtggatatttggacctctctgaggatttcgttggaaacgggataactgcacctaactaaacggaagcattctcagaaactgctttgtgatgattgcattcacctcacagagttgaacattcctattgatagagcagtttggaaacactcttgttgtggaatgtgcaagtggagatttggagcgctttgaggcctatggtagtaaagggaatagcttcatagaaaaactagacagatgcattctcaggaaccttttggtgatgtttgtattcaactcccagagttgaactttcctttggaaagagcagctatgaaacactctttttctagaatctgcaagtggacgtttggagggctttgtggtttgtggtggaaaaggaaatatcttcacctaaatactagatagaagcattctcagaagcttctctgtgatgactgcattcaactcacggagttgaacactccttttgagagcgcagttttgaaactctctttctgtggcatctgcaaggggacatgtagacctctttgaagatttcgttggaaacggaatcatcttcacataaaaactatacagaagcagtctcagaatcttctttgtgatgtttgcattcaaatcccagagttgaactttcctttcaaagttcacgtttgaaacactctttttgcaggatctacaagtggatatttggaccactctgtgtccttcgttcgaaacgggtatatcttcacacgacatctagacagaagctttctcagaaaattctttgggatgattgagtggaactcacagagctgaacattccttgcgatgtagcagtttagaaacacactttctgcagaatctgcaactgcatatttggacctctctgaggaattcgttggaaacgggataattttagctgactaaacagaagcattctcagaaccttcttcatgatgtctgcattcaactcacagtgtggaacctttctttgatagttcaggtttgaaacactctttttgtagaaactgcaaggggataattgcacttctttgaggcctaccgtagtaaaggaaataacttcctatagaaagaagacagaagcattctcagaaccctcttcgtgatgtttgcattcaactcacagtgctgaacctttctttgatagttcagctttgaaacactcttcttgtagaaactgcaagtggatatttggtcctctctgaggatttcgttggaaacgggataaaccgcacagaactaaacagaagaattctcagagccctcttcgtgatgtttgcattcaactcacagtgctgaacctttctttgatagtgcagctttgaaacactctttttgtagaaactgcaagtggatatttggtcctctctgaggatttcgttggaaacgggataaaccgcacagaactaaaacagaagcattgtcagaaacttctttgtgatgattgcattcaactcacagagttgaaggttccttttcaaacagcagtttccaatcactctttctgtggaatctgcaagtggatatttgggcctctctgaggatttcgttggaaacgggataaaacgcacagaactaaaacagaagcattctcagaaacttctctgtgatgtttgtgttcaactcccagagtttcacgttgcttttcatagagtagttctgaaacatgcttttcgtagtgtctgcaagtggacatttggagcgctttcaggcctgtggtggaaaacgaattatggtcacataaaaactggagagaagccttctcagaaacttctctgtgatgattgcattcaactcacagagttgaaccctcctatggatagagcagtgttgaaactctctttttgtggaatctgcaagtggatatgtggacctctccgaagatgtctttggaaacgggaatatcttcacataaaaactaaacagaagcattctcagaaacttcttggtgatgtttgcattcaaatcccagagttgaaccttcctttgatagttcaggtttgaaacactctttctgtaggatctgcaagtggctatttggaccactctgtggccttcgttcgaaacgggtatatcttcgcataaaatctagacagaagcattctcagaaaatactttgtgatgattgagtttaaatcacagagctgaccattcctttggatggagcaggtttgagacacactttttgtagaatctacaagtggatatttggacctctctgaggatttcgttggaaacgggataactgcacctaactaaacggaagcattctcagaaactgctttgtgatgattgcattcacctcacagagttgaacattcctattgatagagcagtttggaaacactcttgttgtggaatgtgcaagtggagatttggagcgctttgaggcctatggtagtaaagggaatagcttcatagaaaaactagacagatgcattctcaggaactttttggtgatgtttgtattcaactcccagagttgaactttcctttggaaagagcagctatgaaacactctttttctagaatctgcaagtggacgtttggagggctttgtggtttgtggtggaaaaggaaatatcttcacctaaatactagatagaagcattctcagaagcttctctgtgatgactgcattcaactcacggagttgaacactccttttgagagcgtagttttgaaactctctttctgtggcatctgcaaggggacatgtagacctctttgaagatttcgttggaaacggaatcatcttcacataaaaactatacagaagcagtctcagaatcttctttgtgatgtttgcattcaaatcccagagttgaactttcctttcaaagttcacgtttgaaacactctttttgcaggatctacaagtggatatttggaccactctgtgtccttcgttcgaaacgggtatatcttcacacgacatctagacagaagctttctcagaaaattctttgggatgattgagtggaactcacagagctgaacattccttgcgatgtagcagtttagaaacacactttctgcagaatctgcaagtgcatatttggacctctctgaggaattcgttggaaacgggataatttcagctgactaaacagaagcattctcagaaccttcttcgtgatgtctgcattcaactcacagtgtggaacctttctttgatagttcaggtttgaaacactctttttgtagaaactgcaaggggataattgcacttctttgaggcctaccgtagtaaaggaaataacttcctatagaaagaagacagaagcattctcagaaccctcttcgtgatgtttgcattcaactcacagtgctgaatctttctttgatagttcagctttgaaacactcttcttgtagaaactgcaagtggatatttggtcctctctgaggatttcgttggaaacgggataaaccgcacagaactaaacagaagcattctcagaaccttcttcgtgatgtttgcattcaactcacagtgttgaacctttctttgatagttcaggtttgaaacggtctttctgtagaaactgcaagtagatatttggacctctctgaggatttcgttggaaacgggataacccgcacagaactaaaacagaagcattcacagaaaactcttggtgacgactgagtttaactcacagagctgaacattcctttggatggagcagtttcgaaacacactatttgtaggatgtgcaagtggatatttgggcctctctgaggatttcgttggaaacgggataaaccgcacagaactaaacagaagcattctcagaaactactttgtgatgattgcattcaagtcacagagttgaacattccctttgacagagcagtttggaaactctctttgtgtagaatctgcaagtggagatatggaccgctttgaggcctatggtagtaaaggaaatagcttcatataaaagctagacagtagcattctcagaaacttctttgtgatgcttgcattcaactcacagagttgaactttcctttcgagagagaagctttgaaacactctttttccagaatctgcaagtggacatttggagggctttgaggcctgtggtggaaaaggaattatcttcccgtaaaagctagatagaagcattgtcagaaacttctttgtgatgattgcattcaactcacagggttgaaggttccttttcaaagagcagtttccaatcactctttctgtggaatctgcaagtggatatttggacctctttgaagatttcgttggaaacgggagaatcttcacagaaaagctaaacagaagcattctcagaaacttctctgtgatgtttgtgttcaactcccagagtttcacattgcttttcatagagtagttctgaaacatgcttttcgtagtgtctacaagtggacatttggagcgctttcaggcctgtggtggaaaacgaattatggtcacataaaaactggagagaagccttctcagaaacttctctgtgatgattgcattcaactcacagagttgaaccctcctatggatagagcagtgttgaaactctctttttgtggaatctgcaagtggatatgtggacctctccgaagatgtctttggaaacgggaatatcttcacataaaaactaaacagaagcattctcagaaacttcttggtgatgtttgcattcaaatcccagagttgaaccttcctttgatagttcaggtttgaaacactctttttgtaggatctgcaagtggatatttggaccactctgtggccttcgttcgaaacgggtacatcttcgcataaaatctagacagaaacattctcagaaaatactttgtgatgattgagtttaaatcacagagctgaacattcctttggatggagcaggtttgagacacactttttgtagaatctacaagtggatatttggacctctctgaggatttcgttggaaacgggataactgcacctaactaaacggaagcattctcagaaactgctttgtgatgattgcattcacctcacagagttgaacattcctattgatagagcagtttggaaacactcttgttgtggaatgtgcaagtggagatttggagcgctttgaggcctatggtagtaaagggaatagcttcatagaaaaactagacagatgcattctcaggaactttttggtgatgtttgtattcaactcccagagttgaactttcctttggaaagagcagctatgaaacactctttttctagaatctgcaagtggacgtttggagggctttgtggtttgtggtggaaaaggaaatatcttcacctaaatactagatagaagcattctcagaagcttctctgtgatgactgcattcaactcacggagttgaacactccttttgagagcgcagttttgaaactctctttctgtggcatctgcaaggggacatgtagacctctttgaaggtttcgttggaaacggaatcatcttcacataaaaactatacagaagcagtctcagaatcttctttgtgatgtttgcattcaaatcccagagttgaactttcctttcaaagttcacgtttgaaacactctttttgcaggatctacaagtggatatttggaccactctgtgtccttcgttcgaaacgggtatatcttcacacgacatctagacagaagctttctcagaaaattctttgggatgattgagtggaactcacagagctgaacattccttgcgatgtagcagtttagaaacacactttctgcagaatctgcaagtgcatatttggacctctctgaggaattcgttggaaacgggataatttcagctgactaaacagaagcattctcagaaccttcttcgtgatgtctgcattcaactcacagtgtggaacctttctttgatagttcaggtttgaaacactctttttgtagaaactgcaaggggataattgcacttctttgaggcctaccgtagtaaaggaaataacttcctatagaaagaagacagaagcattctcagaaccctcttcgtgatgtttgcattcaactcacagtgctgaacctttctttgatagttcagctttgaaacactcttcttgtagaaactgcaagtggatatttggtcctctctgaggatttcgttggaaacgggataaaccgcacagaactaaacagaagaattctcagagccctcttcgtgatgtttgcattcaactcacagtgctgaacctttctttgatagtgcagctttgaaacactctttttgtagaaactgcaagtggatgtttggtcctctctgaggatttcgttggaaacgggataaaccgcacagaactaaaacagaagcattgtcagaaacttctttgtgatgattgcattcaactcacagagttgaaggttccttttcaaacagcagtttccaatcactctttctgtggaatctgcaagtggatatttgggcctctctgaggatttcgttggaaacgggataaaacgcacagaactaaaacagaagcattctcagaaacttctctgtgatgtttgtgttcaactcccagagtttcacgttgcttttcatagagtagttctgaaacatgcttttcgtagtgtctgcaagtggacatttggagcgctttcaggcctgtggtggaaaacgaattatggtcacataaaaactggagagaagccttctcagaaacttctctgtgatgattgcattcaactcacagagttgaaccctcctatggatagagcagtgttgaaactctctttttgtggaacctgcaagtggatatgtggacctctccgaagatgtctttggaaacgggaatatcttcacataaaaactaaacagaagcattctcagaaacttcttggtgatgtttgcattcaaatcccagagttgaaccttcctttgatagttcaggtttgaaacactctttctgtaggatctgcaagtggctatttggaccactctgtggccttcgttcgaaacgggtatatcttcgcataaaatctagacagaagcattctcagaaaatactttgtgatgattgagttaaaatcacagagctgaacattcctttggatggagcaggtttgagacacactttttgtagaatctacaagtggatatttggacctctctgaggatttcgttggaaacgggataactgcacctaactaaacggaagcattctcagaaactgctttgtgatgattgcattcacctcacagagttgaacattcctattgatagagcagtttggaaacactcttgttgtggaatgtgcaagtggagatttggagcgctttgaggcctgtggtagtaaagggaatagcttcatagaaaaactagacagatgcattctcaggaactttttggtgatgtttgtattcaactcccagagttgaactttcctttggaaagagcagctatgaaacactctttttctagaatctgcaagtggacgtttggagggctttgtggtttgtggtggaaaaggaaatatcttcacctaaatactagatagaagcattctcagaagcttctctgtgatgactgcattcaactcacggatttgaacactccttttgagagcgcagttttgaaactctctttctgtggcatctgcaaggggacatgtagacctctttgaagatttcgttggaaacggaatcatcttcacataaaaactatacagaagcagtctcagaatcttctttgtgatgtttgcattcaaatcccagagttgaactttcctttcaaagttcacgtttgaaacactctttttgcaggatctacaagtggatatttggaccactctgtgtccttcgttcgaaacgggtatatcttcacacgacatctagacagaagctttctcagaaaattctttgggatgattgagtggaactcacagagctgaacattccttgcgatgtagcagtttagaaacacactttctgcagaatctgcaagtgcatatttggacctctctgaggaattcgttggaaacgggataatttcagctgactaaacagaagcattctcagaaccttcttcgtgatgtctgcattcaactcacagtgtggaacctttctttgatagttcaggtttgaaacactctttttgtagaaactgcaaggggataattgcacttctttgaggcctaccgtagtaaaggaaataacttcctatagaaagaagacagaagcattctcagaaccctcttcgtgatgtttgcattcaactcacagtgctgaacctttctttgatagttcagctttgaaacactcttcttgtagaaactgcaagtggatatttggtcctctctgaggatttcgttggaaacgggataaaccgcacagaactaaacagaagaattctcagagccctcttcgtgatgtttgcattcaactcacagtgctgaacctttctttgatagtgcagctttgaaacactctttttgtagaaactgcaagtggatatttggtcctctctgaggatttcgttggaaacgggataaaccgcacagaactaaaacagaagcattgtcagaaacttctttgtgatgattgcattcaactcacagagttgaaggttccttttcaaacagcagtttccaatcactctttctgtggaatctgcaagtggatatttgggcctctctgaggatttcgttggaaacgggataaaacgcacagaactaaaacagaagcattctcagaaacttctctgtgatgtttgtgttcaactcccagagtttcacgttgcttttcatagagtagttctgaaacatgcttttcgtagtgtctgcaagtggacatttggagcgctttcaggcctgtggtggaaaacgaattatggtcacataaaaactggagagaagccttctcagaaacttctctgtgatgattgcattcaactcacagagttgaaccctcctatggatagagcagtgttgaaactctctttttgtggaatctgcaagtggatatgtggacctctccgaagatgtctttggaaacgggaatatcttcacataaaaactaaacagaagcattctcagaaacttcttggtgatgtttgcattcaaatcccagagttgaaccttcctttgatagttcaggtttgaaacactctttttgtaggatctgcaagtggctatttggaccactctgtggccttcgttcgaaactggtatatcttcgcataaaatctagacagaagcattctcagaaaatactttgtgatgattgagtttaaatcacagagctgaacattcctttggatggagcaggtttgagacacactttttgtagaatctacaagtggatatttggacctctctgaggatttcgttggaaacgggataactgcacctaactaaacggaagcattctcagaaactgctttgtgatgattgcattcacctcacagagttgaacattcctattgatagagcagtttggaaacactcttgttgtggaatgtgcaagtggagatttggagcgctttgaggcctatggtagtaaagggaatagcttcatagaaaaactagacagatgcattctcaggaactttttggtgatgtttgtattcaactcccagagttgaactttcctttggaaagagcagctatgaaacactctttttgtagaatctgcaagtggacgtttggagggctttgtggtttgtggtggaaaaggaaatatcttcacctaaatactagatagaagcattctcagaagcttctctgtgatgactgcattcaactcacggagttgaacactccttttgagagcgcagttttgaaactctctttctgtggcatctgcaaggggacatgtagacctctttgaagatttcgttggaaacggaatcatcttcacataaaaactatacagaagcagtctcagaatcttctttgtggtgtttgcattcaaatcccagagttgaactttcctttcaaagttcacgtttgaaacactctttttgcaggatctacaagtggatatttggaccactctgtgtccttcgttcgaaacgggtatatcttcacatgacatctagacagaagctttctcagaaaattctttgggatgattgagtggaactcacagagctgaacattccttgcgatgtagcagtttagaaacacactttctgcagaatctgcaagtgcatatttggacctctctgaggaattcgttggaaacgggataatttcagctgactaaacagaagcattctcagaaccttcttcgtgatgtctgcattcaactcacagtgtggaacctttctttgatagttcaggtttgaaacactctttttgtagaaactgcaaggggataattgcactctttgaggagtaccgtagtaaaggaaataacttcctataaaaagaagacagaagcattctcagaaccctcttcgtgatgtttgcattcaactcacagtgctgaacctttctttgatagttcagctttgaaacactctttttgtagaaactgcaagtggatatttggtcctctctgagcatttcgttggaaacgggataaactgcacagaactaaacagaagcattctcagaaccttcttcgtgatgtttgcattcaactcacagtgttgaacctttctttgatagttcaggtttgaaacggtctttctgtagaaactgcaagtagatatttggacctctctgaggatttcgttggaaacgggataacccgcacagaactaaaacagaagcattcacagaaaactcttggtgacgactgagtttaactcacagagctgaacattcctttggatggagcagttttgaaacacactatttgtagaatgtgcaagtggatatttaggcctctctgaggatttcgttggaaacgggataaaccgcacagaactaaacagaagcattctcagaaactactttgtgatgattgcattcaagtcacagagttgaacattccctttgacagagcagtttggaaactctctttgtgtagaatctgcaagtggagatatggaccgctttgaggcctatggtagtaaaggaaatagcttcatataaaagctagacagtagcattctcagaaacttctttgtgatgcttgcattcaactcacagagttgaactttcctttcgagagagaagctttgaaacactctttttccagaatctgcaagtggacatttggagggctttgaggcctgtggtggaaaaggaattaacttcccttaaaagctagatagaagcattgtcagaaacttctttgtgatgattgcattcaactcacagagatgaaggttcctttacaaacagcagtttccaaacactctttctgtggaatctgcaagtggatatttggacctctttgaagatttcgttggaaacgggagaatcttcacagaaaagctaaacagaagcattctcagaaacttctctgtgatgtttgtgttcaactcccagagtttcacattgcttttcatagagtagttctgaaacatgcttttcgtagtgtctgcaagtggacatttggagcgctttcaggcctgtggtggaaaacgaattatggtcccataaaaactggagagaagccttctcagaaacttctctgtgatgattgcattcaactcacagatttgaaccctcctatggatagagcattgttgaaactctctttttgtggaatctgcaagtggatatgtggacctctccgaagatgtactttggaaacgggaatatcttcacataaaaactaaacagaagcattctcagaaacttcttggtgatgtttgcattcaaatcccagagttgaaccttcctgtgatagttcaggtttgaaacactctttttgtaggatctgcaagtggatatttggaccactctgtggccttcgttcgaaacgggtacatcttcacataaaatctagacagaagcattctcagaaaatactttgtgatgattgagtttaactcacagagctgaacattcctttggatggagcaggtttgagacacactttttgtagaatctacaagtggatatttggacctctctgaggatttcgttggaaacgcgataactgcacctaactaaacggaagcattctcagaaactgctttgtgatgattgcattcacctcacagagttgaacattcctattgatagagcagtttggaaacactcttgttgtggaatgtgcaagtggagatttggagcgctttgaggcctatggtagtaaagggaatagcttcatagaaaaactagacagatgcattctcaggaactttttggtgatgtttgtattcaactcccagagttgaactttcctttggaaagagcagctatgaaacactctttttctagaatctgcaagtggacgtttggagggctttgtggtttgtggtggaaaaggaaatatcttcacctaaatactagatagaagcattctcagaagcttctctgtgatgactgcattcaactcacggagttgaacactccttttgagagcgcagttttgaaactctctttctgtggcatctgcaaggggacatgtagacctctttgaagatttcgttggaaacggaatcatcttcacataaaaactatacagaagcagtctcagaatcttctttgtgatgtttgcattcaaatcccagagttgaactttcctttcaaagttcacgtttgaaacactctttttgcaggatctacaagtggatatttggaccactctgtgtccttcgttcgaaacgggtatatcttcacacgacatctagacagaagctttctcagaaaattctttgggatgattgagtggaactcacagagctgaacattccttgcgatgtagcagtttagaaacacactttctgcagaatctgcaagtgcatatttggacctctctgaggaattcgttggaaacgggataatttcagctgactaaacagaagcattctcagaaccttcttcgtgatgtctgcattcaactcacagtgtggaacctttctttgatagttcaggtttgaaacactctttttgtagaaactgcaaggggataattgcacttctttgaggcctaccgtagtaaaggaaataacttcctatagaaagaagacagaagcattctcagaaccctcttcgtgatgtttgcattcaactcacagtgctgaacctttctttgatagttcagctttgaaacactcttcttgtagaaactgcaagtggatatttggtcctctctgaggatttcgttggaaacgggataaaccgcacagaactaaacagaagaattctcagagccctcttcgtgatgtttgcattcaactcacagtgctgaacctttctttgatagtgcagctttgaaacactctttttgtagaaactgcaagtggatgtttggtcctctctgaggatttcgttggaaacgggataaaccgcacagaactaaaacagaagcattgtcagaaacttctttgtgatgattgcattcaactcacagagttgaaggttccttttcaaacagcagtttccaatcactctttctgtggaatctgcaagtggatatttgggcctctctgaggatttcgttggaaacgggataaaacgcacagaactaaaacagaagcattctcagaaacttctctgtgatgtttgtgttcaactcccagagtttcacgttgcttttcatagagtagttctgaaacatgcttttcgtagtgtctgcaagtggacatttggagcgctttcaggcctgtggtggaaaacgaattatggtcacataaaaactggagagaagccttctcagaaacttctctgtgatgattgcattcaactcacagagttgaaccctcctatggatagagcagtgttgaaactctctttttgtggaatctgcaagtggatatgtggacctctccgaagatgtctttggaaacgggaatatcttcacataaaaactaaacagaagcattctcagaaacttcttggtgatgtttgcattcaaatcccagagttgaaccttcctttgatagttcaggtttgaaacactctttctgtaggatctgcaagtggctatttggaccactctgtggccttcgttcgaaacgggtatatcttcgcataaaatctagacagaagcattctcagaaaatactttgtgatgattgagtttaaatcacagagctgaccattcctttggatggagcaggtttgagacacactttttgtagaatctacaagtggatatttggacctctctgaggatttcgttggaaacgggataactgcacctaactaaacggaagcattctcagaaactgctttgtgatgattgcattcacctcacagcagttgaacattcctattgatagagcagtttggaaacactcttgttgtggaatgtgcaagtggagatttggagcgctttgaggcctatggtagtaaagggaatagcttcatagaaaaactagacagatgcattctcaggaactttttggtgatgtttgtattcaactcccagagttgaactttcctttggaaagagcagctatgagacactgtttctctagaatctgcaagtggacgtttggagggctttgtggtttgtggtggaaaggaaatatcttcacctaaatactagatagaagcattctcagaagcttctctgtgatgactgcattcaactcacggagttgaacactccttttgagagcgcagttttgaaactctctttctgtggcatctgcaaggggacatgtagacctctttgaagatttcgttggaaacggaatcatcttcacataaaaactatacagaagcagtctcagaatcttctttgtgatgtttgcattcaaatcccagagttgaactttcctttcaaagttcacgtttgaaacactctttttgcaggatctacaagtggatatttggaccactctgtgtccttcgttcgaaacgggtatatcttcacacgacatctagacagaagctttctcagaaaattctttgggatgattgagtggaactcacagagctgaacattccttgcgatgtagcagtttagaaacacactttctgcagaatctgcaagtgcatatttggacctctctgaggaattcgttggaaacgggataatttcagctgactaaacagaagcattctcagaaccttcttcgtgatgtctgcattcaactcacagtgtggaacctttctttgatagttcaggtttgaaacactctttttgtagaaactgcaaggggataattgcacttctttgaggcctaccgtagtaaaggaaataacttcctatagaaagaagacagaagcattctcagaaccctcttcgtgatgtttgcattcaactcacagtgctgaacctttctttgatagttcagctttgaaacactcttcttgtagaaactgcaagtggatatttggtcctctctgaggatttcgttggaaacgggataaaccgcacagaactaaacagaagaattctcagagccctcttcgtgatgtttgcattcaactcacagtgctgaacctttctttgatagtgcagctttgaaacactctttttgtagaaactgcaagtggatgtttggtcctctctgaggatttcgttggaaacgggataaaccgcacagaactaaaacagaagcattgtcagaaacttctttgtgatgattgcattcaactcacagagttgaaggttccttttcaaacagcagtttccaatcactctttctgtggaatctgcaagtggatatttgggcctctctgaggatttcgttggaaacgggataaaacgcacagaactaaaacagaagcattctcagaaacttctctgtgatgtttgtgttcaactcccagagtttcacgttgcttttcatagagtagttctgaaacatgcttttcgtagtgtctgcaagtggacatttggagcgctttcaggcctgtggtggaaaacgaattatggtcacataaaaactggagagaagccttctcagaaacttctctgtgatgattgcattcaactcacagagttgaaccctcctatggatagagcagtgttgaaactctctttttgtggaatctgcaagtggatatgtggacctctccgaagatgtctttggaaacgggaatatcttcacataaaaactaaacagaagcattctcagaaacttcttggtgatgtttgcattcaaatcccagagttgaaccttcctttgatagttcaggtttgaaacactctttctgtaggatctgcaagtggctatttggaccactctgtggccttcgttcgaaacgggtatatcttcgcataaaatctagacagaagcattctcagaaaatactttgtgatgattgagtttaaatcacagagctgaccattcctttggatggagcaggtttgagacacactttttgtagaatctacaagtggatatttggacctctctgaggatttcgttggaaacgggataactgcacctaactaaacggaagcattctcagaaactgctttgtgatgattgcattcacctcacagagttgaacattcctattgatagagcagtttggaaacactcttgttgtggaatgtgcaagtggagatttggagcgctttgaggcctgtggtagtaaagggaatagcttcatagaaaaactagacagatgcattctcaggaacttctttttggtgatgtttgtattcaactcccagagttgaactttcctttggaaagagcagctatgaaacactctttttctagaatctgcaagtggacgtttggagggctttgtggtttgtggtggaaaaggaaatatcttcacctaaatactagatagaagcattctcagaagcttctctgtgatgactgcattcaactcacggagttgaacactccttttgagagcgcagttttgaaactctctttctgtggcatccgcaaggggacatgtggacctctttgaagatttcgttggaaacggaatcatcttcacataaaaactgtacagaagcagtctcagaatcttctttgtgatgtttgcattcaaatcccagagttgaactttcctttcaaagttcacgtttgaaacactctttttgcaggatctacaagtggatatttggaccactctgtgtccttcgttcgaaacgggtatatcttcacacgacatctagacagaagctttctcagaaaattctttgggatgattgagtggaactcacagagctgaacattccttgcgatgtagcagtttagaaacacactttctgcagaatctgcaagtgcatatttggacctctctgaggaattcgttggaaacgggataatttcagctgactaaacagaagcattctcagaaccttcttcgtgatgtctgcattcaactcacagtgtggaacctttctttgatagttcaggtttgaaacactctttttgtagaaactgcaaggggataattgcacttctttgaggcctaccgtagtaaaggaaataacttcctatagaaagaagacagaagcattctcagaaccctcttcgtgatgtttgcattcaactcacagtgctgaacctttctttgatagttcagctttgaaacactcttcttgtagaaactgcaagtggatatttggtcctctctgaggatttcgttggaaacgggataaaccgcacagaactaaacagaagcattcacagaaaactcttggtgacgactgagtttaactcacagagctgaacattcctttggatggagcagtttcgaaacacactatttgtagaatgtgcaagtggatatttgggcctctctgaggatttcgttggaaacgggataaaccgcacagaactaaacagaagcattctcagtaaactactttgtgatgattgcattcaagtcacagacttgaacattccctttgacagagcagtttggaaactctctttgtgtagaatctgcaagtggagatatggaccgctttggggcctatggtagtaatggaaataggttcatataaaagctagacaatagcattctcagaaacttctttgtgatgcttgcattcaactcacagagttgaactttcctttcgagagagaagctttgaaacactctttttccagaatgtgcaagtggacatttggggagctttgaggcctgtggaggaaaaggaattatcttcccgtaaaagctagatagaagcattgtcagaaacttctttgtgatgattgcattcaactcacagagttgaaggttccttttcaaacagcagtttccaatcactctttctgtggaatctgcaagtggatatttcgacctctttgaagatttcgttggaaacgggagaatcttcacagaaaagctaaacagaagcattctcagaaacttctctgtgatgtttgtgttcaactcccagagtttcacgttccttttcatagagtagttctgaaacatgcttttcgtagtgtctgcaagtggacatttggagcgctttcaggcctgtggtggaaaacgaattatggtcacataaaaactggagagaagccttctcagaaacttctctgtgatgattgcattcaactcacagagttgaaccctcctatggatagagcagtgttgaaactctctttttgtggaatctgcaagtggatatgtggacctctccgaagatgtctttggaaacgggaatatcttcacataaaaactaaacagaagcattctcagaaacttcttggtgatgtttgcattcaaatcccagagttgaaccttcctttgatagttcaggtttgaaacactctttttgtaggatctgcaagtggctatttggaccactctgtggccttcgttcgaaacgggtatatcttcgcataaaatctagacagaagcattctcagaaaatactttgtgatgattgagtttaaatcacagagctgaacattcctttggatggagcaggtttgagacacactttttgtagaatctacaagtggatatttggacctctcggaggatttcgttggaaacgggataactgcacctaactaaacggaagcattctcagaaactgctttgtgatgattgcattcacctcacagagttgaacattcctattgatagagcagtttggaaacactcttgttgtggaatgtgcaagtggagatttggagcgctttgaggcctatggtagtaaagggaatagcttcatagaaaaactagacagatgcattctcaggaactttttggtgatgtttgtattcaactcccagagttgaactttcctttggaaagagcagctatgaaacactctttttctagaatctgcaagtggacgtttggagggctttgtggtttgtggtggaaaaggaaatatcttcacctaaatactagatagaagcattctcagaagcttctctgtgatgactgcattcaactcacggagttgagcactccttttgagagcgcagttttgaaactctctttctgtggcatctgcaaggggacatgtagacctctttgaagatttcgttggaaacggaatcatcttcacataaaaactatacagaagcagtctcagaatcttctttgtgatgtttgcattcaaatcccagagttgaactttcctttcaaagttcacgtttgaaacactctttttgcaggatctacaagtggatatttggaccactctgtgtccttcgttcgaaacggcatatcttcacatgacatctagacagaagctttctcagaaaattctttgggatgattgagtggaactcaacagagctgaacattccttgcgatgtagcagtttagaaacacactttctgcagaatctgcaagtgcatatttggacctctctgaggaattcgttggaaacgggataatttcagctgactaaacagaagcattctcagaaccttcttcgtgatgtgtgcattcaactcacagtgtggaacctttctttgatagttcaggtttgaaacactctttttgtagaaactgcaaggggataattgcacttctttgaggcctaccgtagtaaaggaaataacttcctatagaaagaagacagaagaattctcagagccctcttcgtgatgtttgcattcaactcacagtgctgaacctttctttgatagtgcagctttgaaacactctttttgtagaaactgcaagtggatatttggtcctctctgaggatttcgttggaaacgggataaaccgcacagaactaaacagaagcattgtcagaaacttctttgtgatgattgcattcaactcacagagttgaaggttccttttcaaacagcagtttccaatcactctttctgtggaatctgcaagtggatatttgggcctctctgaggatttcgttggaaacgggataaaacgcacagaactaaaacagaagcattctcagaaacttctctgtgatgtttgtgttcaactcccagagtttcacgttgcttttcatagagtagttctgaaacatgcttttcgtagtgtctgcaagtggacatttggagcgctttcaggcctgtggtggaaaacgaattatggtcacataaaaactggagagaagccttctcagaaacttctctgtgatgattgcattcaactcacagagttgaaccctcctatgggtagagcagtgttgaaactctctttttgtggaatctgcaagtggatatgtggacctctccgaagatgtctttggaaacgggaatatcttcacataaaaactaaacagaagcattctcagaaacttcttggtgatgtttgcattcaaatcccagagttgaaccttcctttgatagttcaggtttgaaacactctttctgtaggatctgcaagtggctatttggaccactctgtggccttcgttcgaaacgggtatatcttcgcataaaatctagacagaagcattctcagaaaatactttgtgatgattgagtttaaatcacagagctgaccattcctttggatggagcaggtttgagacacactttttgtagaatctacaagtggatatttggacctctctgaggatttcgttggaaacgggataactgcacctaactaaacggaaagcattctcagaaactgctttgtgatgattgcattcacctcacaggagttgaacattcctattgatagagcagtttggaaacactcttgttgtggaatgtgcaagtggagatttggagcgctttgaggcctgtggtagtaaagggaatagcttcatagaaaaactagacagatgcattctcaggaactttttggtgatgtttgtattcaactcccagagttgaactttcctttggaaagagcagctatgaaacactctttttctagaatctgcaagtggacgtttggagggctttgtggtttgtggtggaaaaggaaatatcttcacctaaatactagatagaagcatcctcagaagcttctctgtgatgactgcattcaactcacggagttgaacactccttttgagagcgcagttttgaaactctctttctgtggcatctgcaaggggacatgtagacctctttgaagatttcgttggaaacggaatcatcttcacataaaaactatacagaagcagtctcagaatcttctttgtgatgtttgcattcaaatccccgagttgaactttcctttcaaagttcacgtttgaaacactctttttgcaggatctacaagtggatatttggaccactctgtgtccttcgttcgaaacgggtatatcttcacatgacatctagacagaagctttctcagaaaattctttgggatgattgagttgaactcacagagctgagcattccttgcgatgtagcagtttagaaacacactttctgcagaatctgcaagtgcatatttggacctctgtgaggaattcgttggaaacgggataatttcagctgactaaacagaagcattctcagaaccttcttcgtgatgtctgcattcaactcacagtgtggaacctttctttgatagttcaggtttgaaacactctttttgtagaaactgcaaggggataattgcactctttgaggagtaccgtagtaaaggaaataacttcctataaaaagaagacagaagcattctcagaaccctcttcgtgatgtttgcattcaactcacagtgctgaacctttctttgatagttcagctttgaaacactctttttgtagaaactgcaagtggatatttggtcctctctgaggaattcgttggaaacgggataaactgcacagaactaaacagaagcattctcagaacttcttcgtgatgtttgcattcaactcacagtgttgaacctttctttgatagttcaggtttgaaacggtctttctgtagaaactgcaagtagatatttggacctctctgaggatttcgttggaaacgggataacccgcacagaactaaaacagaagcattcacagaaaactcttggtgacgactgagtttaactcacagagctgaacattcctttggatggagcagtttcgaaacacactatttgtagaatgtgcaagtggatatttgggcctctctgaggatttcgttggaaacgggataaaccgcacagaactaaaaagaagcattctcagaaactactttgtgacgattgcattcaagtcacagagttgaacattccctttgacagagcagtttggaaactctctttgtgtagaatctgcaagtggagatatggaccgctttgaggcctatggtagtaaaggaaatagcttcatataaaagctagacagtagcattctcagaaacttctttgtgatgcttgcattcaactcacagagttgaactttcctttcgagagagaagctttgaaacactctttttccagaatctgcaagtggacatttggagggctttgaggcctgtggtggaaaaggaattaacttcccgtaaaagctagatagaagcattgtcagaaacttctttgtgatgattgcattcaactcacagagatgaaggttcctttacaaacagcagtttccaaacactctttctgtggaatctgcaagtggatatttggacctctttgaagatttcgttggaaacgggagaatcttcacagaaaagctaaacagaagcattctcagaaacttctctgtgatgtttgtgttcaactcccagagtttcacattgcttttcatagagtagttctgaaacatgcttttcgtagtgtctgcaagtggacatttggagcgctttcaggcctgtggtggaaaacgaattatggtcacataaaaactggagagaagccttctcagaaacttctctgtgatgattgcattcaactcacagagttgaaccctcctatggatagagcagtgttgaaactctctttttgtggaatctgcaagtggatatgtggacctctccgaagatgtctttggaaacgggaatatcttcacataaaaactaaacagaagcattctcagaaacttcttggtgatgtttgcattcaaatcccagagttgaaccttcctttgagagttcaggtttgaaacactctttttgtaggatctgcaagtggatatttggaccaccctgtggccttcgttcgaaacgggtacatcttcgcataaaatctagacagaagcattctcagaaaatactttgtgatgattgagttgaactcacagagctgaacattcctttggatggagcaggtttgagacacactttttgtagaatctacaagtggatatttggacctctctgaggatttcgttggaaacgggataactgcacctaactaaacggaagcattctcagaaactgctttgtgatgattgcattcacctcacagggttgaacattcctattgatagagcagtttggaaacactcttgttgtggaatgtgcaagtggagatttggagcgctttgaggcttatggtagtaaagggaatagcttcatagaaaaactagacagatgcattctcaggaactttttggtgatgtttgtattcaactcccagagttgaactttcctttggaaagagcagctatgaaacactctttttctagaatctgcaagtggacgtttggagggctttgtggtttgtggtggaaaggaaatatcttcacctaaatactagatagaagcattctcagaagcttctctgtgatgactgcattcaactcatggagttgaacactccttttgagagcgcagttttgaaactctctttctgtggcatccgcaaggggacatgtggacctctttgaagatttcgttggaaacggaatcatcttcacatcaaaactatacagaagcagtctcagaatcttctttgtgatgtttgcattcaaatcccagagttgaactttcctttcaaagttcacgtttgaaacactctttttgcaggatctacaagtggatatttggaccactctgtgtccttcgttcgaaacgggtatatcttcacatgacatctacacagaagctttctcagaaaattctttgggatgattgagtggaactcacagagctgaacattccttgcgatgtagcagtttagaaacacactttctgcagaatctgcaagtacatatttggacctctctgaggaattcgttggaaacgggataatttcagctgactaaacagacgcattctcagaaccttcttcgtgatgtctgcattcaactcacagtgtggaacctttctttgatagttcaggtttgaaacactctttttgtagaaactgcaaggggataattgcacttctttgaggcctaccgtagtaaaggaaataacttcctatagaaagaagacagaagcattctcagaaccctcttcgtgatgtttgcattcaactcacagtgctgaacctttctttgatagttcagctttgaaacactcttcttgtagaaactgcaagtggatatttggtcctctctgaggatttcgttggaaacgggataaaccgcacagaactaaacagaagcattctcagagccctcttcgtgatgtttgcattcaactcacagtgctgaacctttctttgatagtgcagctttgaaacactctttttgtagaaactgcaagtggatgttttgtcctccctgaggatttcgttggaaacgggataaaccgcacagaactaaaacagaagcattctcagaaccttcttcgtgatgtttgcattcaactcacagtgttgaacctttctttgatagttcaggtttgaaacggtctttctgtagaaactgcaagtagatatttggacctctctgaggatttcgttggaaacgggataaaccgcacagaactaaaacagaagcattcacagaaaactcttggtgacgactgagtttaactcacagagctgaacattcctttggatggagcagtttcgaaacacactatttgtagaatgtgcaagtggatatgtgggcctctctgaggatttcgttggaaacgggataaaccgcacagaactaaacagaagcattctcagaaactactttgtgatgattgcattcaagtcacagagttgaacattccctttgacagagcagtttggaaactctctttgtgtagaatctgcaagtggagatatggaccgctttgaggcctatggtagtaaaggaaatagcttcatataaaagctagacagtagcattctgagaaacttctttgtgatgcttgcattcaactcacagagttgaactttcctttcgagagagaagctttgaaacactctttttccagaatctgcaagtggacatttggagggctttgaggcctgtggtggaaaaggaattatcttcccgtaaaagctagatagaagcattgtcagaaacttctttgtgataattgcattcaagtcacagagttgaaggttccttttcaaagagcagtttccaatcactctttctgtggaatctgcaagtggatatttggacctctttgaagatttcgttggaaacgggagaatcttcacagaaaagctaaacagaagcattctcagaaacttctctgtgatgtttgtgttcaactcccagagtttcacattgcttctcatagagtagttctgaaacatgcttttcgtagtgtctgcaagtggacatttggagcgctttcaggcctgtggtggaaaacgaattatggtcacataaaaactggagagaagccttctcagaaacttctctgtgatgattgcattcaactcacagagttgaaccctcctatggatagagcagtgttgaaactctctttttgtggaatctgcaagcggatatgtggacctctccgaagatgtctttggaaacgggaatatcttcacataaaaactaaacagaagcattctcagaaacttcttcgtgatgtttgcattcaaatcccagagttgaaccttcctttgagagttcaggtttgaaacactctttttgtaggatctgcaagtggatatttggaccactctgtggccttcgttcgaaacgggtacatcttcgcataaaatctagacagaagcattctcagaaaatactttgtgatgattgagttgaactcacagagctgaacattcctttggatggagcaggtttgagacacactttttgtagaatctacaagtggatatttggacctctctgaggatttcgttggaaacgggataactgcacctaactaaacggaagcattctcagaaactgctttgtgatgattgcattcacctcacagagttgaacattcgtattgatagagcagtttggaaacactcttcttgtggaatgtgcaagtggagatttggagcgctttggggcctatggtagtaaagggaatagcttcatagaaaaactagacagatgcattctcaggtaactttttggtgatgtttgtattcaactcccagcagttgaactttcctttggaaagagcagctatgaaacactctttttctagaatctgcaagtggacgtttggagggctttgtggtttgtggtggaaaaggaaatatcttcacctaaatactagacagaagcattctcagaagcttctctgtgatgactgcattcaactcacggagttgaacactccttttgagagcgcagttttgaaactctctttctgtggcatctgcaaggggacatgtggacctctttgaagatttcgttggaaacggaatcatcttcacataaaaactatacagaagcagtctcagaatcttctttgtgatgtttgcattcaaatcccagagttgaactttcctttcaaagttcacgtttgaaacactctttttgcaggatctacaagtggatatttggaccactctgtgtccttcgttcgaaacgggtatatcttcacacgacatctagacagaagctttctcagaaaattctttgggatgattgagtggaactcacagagctgaacattccttgcgatggagcagtttagaaacacactttctgcagaatctgcaagtgcatatttggacctctctgaggaattcgttggaaacgggataatttcagctgactaaacagaagcattctcagaaccttcttcgtgatgtctgcattcaactcacagtgtggaacctttctttgatagttcaggtttgaaacactctttttgtagaaactgcaaggggataattgcacttctttgaggcctaccgtagtaaaggaaataacttcctatagaaagaagacagaagcattctcagaaccctcttcgtgatgtttgcattcaactcacagtgctgaacctttctttgatagttcagctttgaaacactcttcttgtagaaactgcaagtggatatttggtcctctctgaggatttcgttggaaacgggataaaccgcacagaactaaacagaagcattctcagagccctcttcgtgatgtttgcattcaactcacagtgctgaacctttctttgatagtgcagctttgaaacactctttttgtagaaactgcaagtggatatttggtcctctctgaggatttcgttggaaacgggataaaccgcacagaactaaaacagaagcattgtcagaaacttctttgtgatgattgcattcaactcacagagttgaaggttccttttcaaacagcagtttccaatcactctttctgtggaatctgcaagtggatatttgggcctctctgaggatttcgttggaaacgggataaaacgcacagaactaaaacagaagcattctcagaaaacttctctgtgatgtttgtgttcaactcccagagtttcacgttgcttttcatagagtagttctgaaacatgcttttcgtagtgtctgcaagtggacatttggagcgctttcaggcctgtggtggaaaacgaattatggtcacataaaaactggagagaagccttctcagaaacttctctgtgatgattgcattcaactcacagagttgaaccctcctatggatagagcagtgttgaaactctctttttgtggaatctgcaagtggatatgtggacctctccgaagatgtctttggaaacgggaatatcttcacataaaaactaaacagaagcattctcagaaacttcttggtgatgtttgcattcaaatcccagagttgaaccttcctttgatagttcaggtttgaaacactctttttgtaggatctgcaagtggatatttggaccactctgtggccttcgttcgaaacgggtacatcttcgcataaaatctagacagaagcattctcagaaaatactttgtgatgattgagtttaactcacagagctgaacattcctttggatggagcaggtttgagacacaccttttgtagaatctacaagtggatatttggacctctctgaggatttcgttggaaacgggataactgcacctaactaaacggaagcattctcagaaactgctttgtgatgattgcattcacctcacagagttgaacattcctattgatagagcagtttggaaacactcttgttgtggaatgtgcaagtggagatttggagcgctttgaggcctatggtagtaaagggaatagcttcatagaaaaactagacagatgcattctcaggaactttttggtgatgtttgtattcaactcccagagttgaactttcctttggaaagagcagctatgaaacactgtttttctagaatctgcaagtggacgtttggagggctttgtggtttgtggtggaaaaggaaatatcttcacctaaatactagatagaagcatcctcagaagcttctctgtgatgactgcattcaactcacggagttgaacactccttttgagagcgcagttttgaaactctctttctgtggcatctgcaaggggacatgtagacctctttgaagatttcgttggaaacggaatcatcttcacataaaaactatacagaagcagtctcagaatcttctttgtgatgtttgcattcaaatccccgagttgaactttcctttcaaagttcacgtttgaaacactctttttgcaggatctacaagtggatatttggaccactctgtgtccttcgttcgaaacgggtatatcttcacatgacatctagacagaagctttctcagaaaattctttgggatgattgagttgaactcacagagctgagcattccttgcgatgtagcagtttagaaacacactttctgcagaatctgcaagtgcatatttggacctctgtgaggaattcgttggaaacgggataatttcagctgactaaacagaagcattctcagaaccttcttcgtgatgtctgcattcaactcacagtgtggaacctttctttgatagttcaggtttgaaacactctttctgtagaaactgcaaggggataattgcactctttgaggagtaccgtagtaaaggaaataacttcctataaaaagaagacagaagcattctcagaaccctcttcgtggtgtttgcattcaactcacagtgctgaacctttctttgatagttcagctttgaaacactctttttgtagaaactgcaagtggatatttggtcctctctgaggatttcgttggaaacgggataaactgcacagaactaaacagaagcattctcagaaccttcttcgtgatgtttgcattcaactcacagtgtggaacctttctttgatagttcaggtttgaaacggtctttctgtagaaactgcaagtagatatttggacctctctgaggatttcgttggaaacgggataacccgcacagaactaaaacagaagcattcacagaaaactcttggtgacgactgagtttaactcacagagctgaacattcctttggatggagcagtttcgaaacacactatttgtagaatgtgcaagtggatatttgggcctctctgaggatttcgttggaaacgggataaaccgcacagaactaaacagaagcattctcagaaactactttgtgatgattgcattcaagtcacagagttgaacattccctttgacagagcagtttggaaactctctttgtgtagaatctgcaagtggagatatggaccgctttgaggcctatggtagtaaaggaaatagcttcatataaaagctagacagtagcattctcagaaacttctttgtgatgcttgcattcaactcacagagttgaactttcctttcgagagagaagctttgaaacactctttttccagaatctgcaagtggacatttggagggctttgaggcctgtggtggaaaaggaattatcttcccgtaaaagctagatagaagcattgtcagaaacttctttgtgatgattgcattcaactcacagagttgaaggttccttttcaaagagcagtttccaatcactctttgtgtggaatctgcaagtggatatttggacctattttgaagatttcgttggaaacgggagaatcttcacaggaaagctaaacagaagcattctcagaaacttctctgtgatgtttgtgttcaactcccagagtttcacattgcttttcatagagtagttctgaaacatgcttttcgtagtgtctacaagtggacatttggagcgctttcaggcctgtggtggaaaacgaattatggtcacataaaaactggagagaagccttctcagaaacttctctgtgatgattgcattcaactcacagagttgaaccctcctatggatagagcagtgttgaaactctctttttgtggaatctgcaagtggatatgtggacctctccgaagatgtctttggaaacgggaatatcttcacataaaaactaaacagaagcattctcagaaacttcttggtgatgtttgcattcaaatcccagagttgaaccttcctttgatagttcaggtttgaaacactctttttgtaggttctgcaagtggatatttggaccactctgtggccttcgttcgaaacgggtatatcttcgcataaaatctagacagaagcattctcagaaaatactttgtgatgattgagtttaactcacagagctgaacattcctttggatggagcaggtttgagacacactttttgtagaatctacaagtggatatttggacctctctgaggatttcgttggaaacgcgataactgcacctaactaaacggaagcattctcagaaactgctttgtgatgattgcattcacctcacagagttgaacattcctattgatagagcagtttggaaacactcttgttgtggaatgtgcaagtggagatttggagcgctttgaggtctatggtagtaaagggaatagcttcatagaaaaactagacagatgcattctcaggaactttttggtgatgtttgtattcaactcccagagttgaactttcctttggaaagagcagctatgaaacactctttttctagaatctgcaagtggacgtttggagggctttgtggtttgtggtggaaaaggaaatatcttcacctaaatactagatagaagcattctcagaagcttctctgtgatgactgcattcaactcacggagttgaacactccttttgagagcgcagttttgaaaatctctttctgtggcatctgcaaggggacatgtagacctctttgaagatttcgttggaaacggaatcatcttcacataaaaactatacagaagcagtctcagaatcttctttgtgatgtttgcattcaaatcccagagttgaactttcctttcaaagttcacgtttgaaacactctttttgcaggatctacaagtggatatttggaccactctgtgtccttcgttcgaaacgggtataacttcacacgacatctagacagaagctttctcagaaaattctttgggatgattgagtggaactcacagagctgaacattccttgcgatgtagcagtttagaaacacactttctgcagaatctgcaagtgcatatttggacctctctgaggaattcgttggaaacgggataatttcagctgactaaacagaagcattctcagaaccttcttcgtgatgtctgcattcaactcacagtgtggaacctttctttgatagttcaggtttgaaacactctttttgtagaaactgcaaggggataattgcacttctttgaggcctaccgtagtaaaggaaataacttcctatagaaagaagacagaagcattctcagaaccctcttcgtgatgtttgcattcaactcacagtgctgaacctttctttgatagttcagctttgaaacactcttcttgtagaaactgcaagtggatatttggtcctctctgaggatttcgttggaaacgggataaaccgcacagaactaaacagaagaattctcagagccctcttcgtgatgtttgcattcaactcacagtgctgaacctttctttgatagtgcagctttgaaacactctttttgtagaaactgcaagtggatgtttggtcctctctgaggatttcgttggaaacgggataaaccgcacagaactaaaacagaagcattgtcagaaacttctttgtgatgattgcattcaactcacagagttgaaggttccttttcaaacagcagtttccaatcactctttctgtggaatctgcaagtggatatttgggcctctctgaggatttcgttggaaacgggataaaacgcacagaactaaaacagaagcattctcagaaacttctctgtgatgtttgtgttcaactcccagagtttcacgttgcttttcatagagtagttctgaaacatgcttttcgtagtgtctgcaagtggacatttggagcgctttcaggcctgtggtggaaaacgaattatggtcacataaaaactggagagaagccttctcagaaacttctctgtgatgattgcattcaactcacagagttgaaccctcctatggatagagcagtgttgaaactctctttttgtggaatctgcaagtggatatgtggacctctccgaagatgtctttggaaacgggaatatcttcacataaaaactaaacagaagcattctcagaaacttcttggtgatgtttgcattcaaatcccagagttgaaccttcctttgatagttcaggtttgaaacactctttctgtaggatctgcaagtggctatttggaccactctgtggccttcgttcgaaacgggtatatcttcgcataaaatctagacagaagcattctcagaaaatactttgtgatgattgagtttaaatcacagagctgaccattcctttggatggagcaggtttgagacacactttttgtagaatctacaagtggatatttggacctctctgaggatttcgttggaaacgggataactgcacctaactaaacggaagcattctcagaaactgctttgtgatgattgcattcacctcacagagttgaacattcctattgatagagcagtttggaaacactcttgttgtggaatgtgcaagtggagatttggagcgctttgaggcctgtggtagtaaagggaatagcttcatagaaaaactagacagatgcattctcaggaactttttggtgatgtttgtattcaactcccagagttgaactttcctttggaaagagcagctatgaaacactctttttctagaatctgcaagtggacgtttggagggctttgtggtttgtggtggaaaaggaaatatcttcacctaaatactagatagaagcattctcagaagcttctctgtgatgactgcattcaactcacggagttgaacactccttttgagagcgcagttttgaaactctctttctgtggcatctgcaaggggacatgtagacctctttgaagatttcgttggaaacggaatcatcttcacataaaaactatacagaagcagtctcagaatcttctttgtgatgtttgcattcaaatcccagagttgaactttcctttcaaagttcacgtttgaaacactctttttgcaggatctacaagtggatatttggaccactctgtgtccttcgttcgaaacgggtatatcttcacacgacatctagacagaagctttctcagaaaattctttgggatgattgagtggaactcacagagctgaacattccttgcgatgtagcagtttagaaacacactttctgcagaatctgcaagtgcatatttggacctctctgaggaattcgttggaaacgggataatttcagctgactaaacagaagcattctcagaaccttcttcgtgatgtctgcattcaactcacagtgtggaacctttctttgatagttcaggtttgaaacactctttttgtagaaactgcaaggggataattgcacttctttgaggcctaccgtagtaaaggaaataacttcctatagaaagaagacagaagcattctcagaaccctcttcgtgatgtttgcattcaactcacagtgctgaacctttctttgatagttcagctttgaaacactcttcttgtagaaactgcaagtggatatttggtcctctctgaggatttcgttggaaacgggataaaccgcacagaactaaacagaagcattctcagagccctcttcgtgatgtttgcattcaactcacagtgctgaacctttctttgatagtgcagctttgaaacactctttttgtagaaactgcaagtggatatttggtcctctctgaggatttcgttggaaacgggataaaccgcacagaactaaaacagaagcattgtcagaaacttctttgtgatgattgcattcaactcacagagttgaaggttccttttcaaacagcagtttccaatcactctttctgtggaatctgcaagtggatatttgggcctctctgaggatttcgttggaaacgggataaaacgcacagaactaaaacagaagcattctcagaaacttctctgtgatgtttgtgttcaactcccagagtttcacgttgcttttcatagagtagttctgaaacatgcttttcgtagtgtctgcaagtggacatttggagcgctttcaggcctgtggtggaaaacgaattatggtcacataaaaactggagagagccttctcagaaacttctctgtgatgattgcattcaactcacagagttgaaccctcctatggatagagcagtgttgaaactctctttttgtggaatctgcaagtggatatgtggacctctccgaagatgtctttggaaacgggaatatcttcacataaaaactaaacagaagcattctcagaaacttcttggtgatgtttgcattcaaatcccagagttgaaccttcctttgatagttcaggtttgaaacactctttctgtaggatctgcaagtggctatttggaccactctgtggccttcgttcgaaacgggtatatcttcgcataaaatctagacagaagcattctcagaaaatactttgtgatgattgagtttaactcacagagctgaacattcctttggatggagcaggtttgagacacaccttttgtagaatctacaagtggatatttggacctctctgaggatttcgttggaaacgggataactgcacctaactaaacggaagcattctcagaaactgctttgtgatgattgcattcacctcacagagttgaacattcctattgatagagcagtttggaaacactcttgttgtggaatgtgcaagtggagatttggagcgctttgaggcctatggtagtaaagggaatagcttcatagaaaaactagacagatgcattctcaggaactttttggtgatgtttgtattcaactcccagagttgaactttcctttggaaagagcagctatgaaacactgtttttctagaatctgcaagtggacgtttggagggctttgtggtttgtggtggaaaaggaaatatcttcacctaaatactagatagaagcatcctcagaagcttctctgtgatgactgcattcaactcacggagttgaacactccttttgagagcgcagttttgaaactctctttctgtggcatctgcaaggggacatgtagacctctttgaagatttcgttggaaacggaatcatcttcacataaaaactatacagaagcagtctcagaatcttctttgtgatgtttgcattcaaatccccgagttgaactttcctttcaaagttcacgtttgaaacactctttttgcaggatctacaagtggatatttggaccactctgtgtccttcgttcgaaacgggtatatcttcacatgacatctagacagaagctttctcagaaaattctttgggatgattgagttgaactcacagagctgagcattccttgcgatgtagcagtttagaaacacactttctgcagaatctgcaagtgcatatttggacctctgtgaggaattcgttggaaacgggataatttcagctgactaaacagaagcattctcagaaccttcttcgtgatgtctgcattcaactcacagtgtggaacctttctttgatagttcaggtttgaaacactctttctgtagaaactgcaaggggataattgcactctttgaggagtaccgtagtaaaggaaataacttcctataaaaagaagacagaagcattctcagaaccctcttcgtgatgtttgcattcaactcacagtgctgaacctttctttgatagttcagctttgaaacactctttttgtagaaactgcaagtggatatttggtcctctctgagcatttcgttggaaacgggataaactgcacagaactaaacagaagcattctcagaacttcttcgtgatgtttgcattcaactcacagtgttgaacctttctttgatagttcaggtttgaaacggtctttctgtagaaactgcaagtagatatttggacctctctgaggatttcgttggaaacgggataacccgcacagaactaaaacagaagcattcacagaaaactcttggtgacgactgagtttaactcacagagctgaacattcctttggatggagcagtttcgaaacacactatttgtagaatgtgcaagtggatatgtgggcctctctgaggatttcgttggaaacgggataaaccgcacagaactaaacagaagcattctcagaaactactttgtgatgattgcattcaagtcacagagttgaacattccctttgacagagcagtttggaaactctctttgcgtagaatctgcaagtggagatatggaccgctttgaggcctatggtagtaaaggaaatagcttcatataaaagctagacagcagcattctcagaaacttctttgtgatgcttgcattcaactcacagagttgaactttcctttcgagagagaagctttgaaacactctttttccagaatctgcaagtggacatttggagggctttgaggcctgtggtggaaaaggaattatcttcccgtaaaagctagatagaagcattgtcagaaacttctttgtgatgattgcattcaagtcacagagttgaaggttccttttcaaagagcagtttccaatcactctttctgtggaatctgcaagtggatatttggacctctttgaagatttcgttggaaacgggagaatcttcacagaaaagctaaacagaagcattctcagaaacttctctgtgatgtttgtgttcaactcccagagtttcacattgcttctcatagagtagttctgaaacatgcttttcgtagtgtctgcaagtggacatttggagcgctttcaggcctgtggtggaaaacgaattatggtcacataaaaactggagagaagccttctcagaaacttctctgtgataattgcattcaactcacagagttgaaccctcctatggatagagcagtgttgaaactctctttttgtggaatctgcaagcggatatgtggacctctccgaagacatctttggaaacgggaatatcttcacataaaaactaaacagaagcattctcagaaacttcttggtgatgtttgcattcaaatcccagagttgaaccttcctttgagagttcaggtttgaaacactctttttgtaggatctgcaagtggatatttggaccactctgtggccttcgttcgaaacgggtacatcttcgcataaaatctagacagaagcattctcagaaaatactttgtgatgattgagttgaactcacagagctgaacattcctttggatggagcaggtttgagacacactttttgtagaatctacaagtggatatttggacctctctgaggatttcgttggaaacgggataactgcacctaactaaacggaagcattctcagaaactgctttgtgatgattgcattcacctcacagagttgaacattcctattgatagagcagtttggaaacactcttgttgtggaatgtgcaagtggagatttggagcgctttgaggcctatggtagtaaagggaatagcttcatagaaaaactagacagatgcattctcaggaactttttggtgatgtttgtattcaactcccagcagttgaactttcctttggaaagagcagctatgaaacactctttttctagaatctggaagtggacgtttggagggctttgtggtttgtggtggaaaaggaaatatcttcacctaaatactagatagaagcattctcagaagcttctctgtgatgactgcattcaactcacggagttgaacactccttttgagagcgcagttttgaaactctctttctgtggcatctgcaaggggacatgtagacctctttgaagatttcgttggaaacggaatcatcttcacataaaaactatacagaagcagtctcagaatcttctttgtgatgtttgcattcaaatcccagagttgaactttcctttcaaagttcacgtttgaaacactctttttgcaggatctacaagtggatatttggaccactctgtgtccttcgttcgaaacgggtatatcttcacacgacatctagacagaagctttctcagaaaattctttgggatgattgagtggaactcacagagctgaacattccttgcgatgtagcagtttagaaacacactttctgcagaatctgcaagtgcatatttggacctctctgaggaattcgttggaaacgggataatttcagctgactaaacagaagcattctcagaaccttcttcgtgatgtctgcattcaactcacagtgtggaacctttctttgatagttcaggtttgaaacactctttttgtagaaactgcaaggggataattgcacttctttgaggcctaccgtagtaaaggaaataacttcctatagaaagaagacagaagcattctcagaaccctcttcgtgatgtttgcattcaactcacagtgctgaacctttctttgatagttcagctttgaaacactcttcttgtagaaactgcaagtggatatttggtcctctctgaggatttcgttggaaacgggataaaccgcacagaactaaacagaagaattctcagagccctcttcgtgatgtttgcattcaactcacagtgctgaacctttctttgatagtgcagctttgaaacactctttttgtagaaactgcaagtggatgtttggtcctctctgaggatttcgttggaaacgggataaaccgcacagaactaaaacagaagcattgtcagaaacttctttgtgatgattgcattcaactcacagagttgaaggttccttttcaaacagcagtttccaatcactctttctgtggaatctgcaagtggatatttgggcctctctgaggatttcgttggaaacgggataaaacgcacagaactaaaacagaagcattctcagaaacttctctgtgatgtttgtgttcaactcccagagtttcacattgcttttcatagagtagttctgaaacatgcttttcgtagtgtctacaagtggacatttggagcgctttcaggcctgtggtggaaaacgaattatggtcacataaaaactggagagaagccttctcagaaacttctctgtgatgattgcattcaactcacagagttgaaccctcctatggatagagcagtgttgaaactctctttttgtggaatctgcaagtggatatgtggacctctccgaagatgtctttggaaacgggaatatcttcacataaaaactaaacagaagcattctcagaaacttcttggtgatgtttgcattcaaatcccagagtcgaaccttcctttgatagttcaggtttgaaacactctttttgtaggatctgcaagtggatatttggaccactctgtggccttcgttcgaaacgggtatatcttcgcataaaatctagacagaagcattctcagaaaatactttgtgatgattgagtttaactcacagagctgaacattcctttggatggagcaggtttgagacacaccttttgtagaatctacaagtggatatttggacctctctgaggatttcgttggaaacgggataactgcacctaactaaacggaagcattctcagaaactgctttgtgatgattgcattcacctcacagagttgaacattcctattgatagagcagtttggaaacactcttgttgtggaatgtgcaagtggagatttggagcgctttgaggcctatggtagtaaagggaatagcttcatagaaaaactagacagatgcattctcaggaactttttggtgatgtttgtattcaactcccagagttgaactttcctttggaaagagcagctatgaaacactgtttttctagaatctgcaagtggacgtttggagggctttgtggtttgtggtggaaaaggaaatatcttcacctaaatactagatagaagcattctcagaagcttctctgtgatgactgcattcaactcacggagttgaacactccttttgagagcgcagttttgaaactctctttctgtggcatctgcaagaggacatgtagacctctttgaagatttcgttggaaacggaatcatcttcacataaaaactatacagaagcagtctcagaatcttctttgtgatgtttgcattcaaatcccagagttgaactttcctttcaaagttcacgtttgaaacactctttttgcaggatcttcaagtggatatttggaccactctgtgtccttcgttcgaaacgggtatatcttcacatgacatctagacagaagctttctcagaaaattctttgggatgattgagtggaactcacagagctgaacattccttgcgatgtagcagtttagaaacacactttctgcagaatctgcaagtgcatatttggacctctctgaggaattcgttggaaacgggataatttcagctgactaaacagaagcattctcagaaccttcttcgtgatgtctgcattcaactcacagtgtggaacctttctttgatagttcaggtttgaaacactctttttgtagaaactgcaaggggataattgcacttctttgaggcctaccgtagtaaaggaaataacttcctatagaaagaagacagaagcattctcagaaccctcttcgtgatgtttgcattcaactcacagtgctgaacctttctttgatagttcagctttgaaacactcttcttgtagaaactgcaagtggatatttggtcctctctgaggatttcgttggaaacgggataaaccgcacagaactaaacagaagaattctcagagccctcttcgtgatgtttgcattcaactcacagtgctgaacctttctttgatagtgcagctttgaaacactctttttgtagaaactgcaagtggatgtttggtcctctctgaggatttcgttggaaacgggataaaccgcacagaactaaaacagaagcattgtcagaaacttctttgtgatgattgcattcaactcacagagttgaaggttccttttcaaacagcagtttccaatcactctttctgtggaatctgcaagtggatatttgggcctctctgaggatttcgttggaaacgggataaaacgcacagaactaaaacagaagcattctcagaaacttctctgtgatgtttgtgttcaactcccagagtttcacgttgcttttcatagagtagttctgaaacatgcttttcgtagtgtctgcaagtggacatttggagcgctttcaggcctgtggtggaaaacgaattatggtcacataaaaactggagagaagccttctcagaaacttctctgtgatgattgcattcaactcacagagttgaaccctcctatggatagagcagtgttgaaactctctttttgtggaatctgcaagtggatatgtggacctctccgaagatgtctttggaaacgggaatatcttcacataaaaactaaacagaagcattctcagaaacttcttggtgatgtttgcattcaaatcccagagttgaaccttcctttgatagttcaggtttgaaacactctttctgtaggatctgcaagtggctatttggaccactctgtggccttcgttcgaaatgggtatatcttcgcataaaatctagacagaagcattctcagaaaatactttgtgatgattgagtttaaatcacagagctgaccattcctttggatggagcaggtttgagacacactttttgtagaatctacaagtggatatttggacctctctgaggatttcgttggaaacgggataactgcacctaactaaacggaagcattctcagaaactgctttgtgatgattgcattcacctcacagagttgaacattcctattgatagagcagtttggaaacactcttgttgtggaatgtgcaagtggagatttggagcgctttgaggcctgtggtagcaaagggaatagcttcatagaaaaactagacagatgcattctcaggaacttctttttggtgatgtttgtattcaactcccagagttgaactttcctttggaaagagcagctatgaaacactctttttctagaatctgcaagtggacgtttggagggctttgtggtttgtggtggaaaaggaaatatcttcacctaaatactagatagaagcattctcagaagcttctctgtgatgactgcattcaactcacggcagttgaacactccttttgagagcgcagttttgaaactctctttctgtggcatctgcaaggggacatgtagacctctttgaagatttcgttggaaacggaatcatcttcgcataaaaactatacagaagcagtctcagaatcttctttgtgatgtttgcattcaaatcccagagttgaactttcctttcgaagttcacgtttgaaacactctttttgcaggatctacaagtggatatttggaccactctgtgtccttcgttcgaaacgggtatatcttcacacgacatctagacagaagctttctcagaaaattctttgggatgattgagtggaactcacagagctgaacattccttgcgatgtagcagtttagaaacacactttctgcagaatctgcaagtgcatatttggacctctctgaggaattcgttggaaacgggataatttcagctgactaaacagaagcattctcagaaccttcttcgtgatgtctgcattcaactcacagtgtggaacctttctttgatagttcaggtttgaaacactctttttgtagaaactgcaaggggataattgcacttctttgaggcctaccgtagtaaaggaaataacttcctatagaaagaagacagaagcattctcagaaccctcttcgtgatgtttgcattcaactcacagtgctgaacctttctttgatagttcagctttgaaacactcttcttgtagaaactgcaagtggatatttggtcctctctgaggatttcgttggaaacgggataaaccgcacagaactaaacagaaagaattctcagagccctcttcgtgatgtttgcattcaactcacagtgctgaacctttctttgatagtgcagctttgaaacactctttttgtagaaactgcaagtggatgtttggtcctctctgaggatttcgttggaaacgggataaaccgcacagaactaaaacagagcattctcagaaccttcttcgtgatgtttgcattcaactcacagtgttgaacctttctttgatagttcaggtttgaaacggtctttctgtagaaactgcaagtagatatttggacctctctgaggatttcgttggaaacgggatacaccgcacagaactaaaacagaagcattcacagaaaactcttggtgacgactgagtttaactcacagagctgaacattcctttggatggagcagtttcgaaacacactatttgtagaatctgcaagtggatatttgggcctctctgaggatttcgttggaaacgggataaaacgcacagaactaaaacagaagcattctcagaaactactttgtgatgattgcattcaagtcacagagttgaacattccctttgacagagcagtttggaaactctctttgtgtagaatctgcaagtggagatatggaccgctttgaggcctatggtagtaaaggaaatagcttcatataaaacctagacagtagcattctcagaaacttctttgtgatgcttgcattcaactcacagagttgaactttcctttcgagagagaagctttgaaacactctttttccagaatgtgcaagtggacatttggggagctttgaggcctgtggaggaaaaggaattatcttcccgtaaaagctagatagaagcattgtcagaaacttctttgtgatgattgcattcaactcacagagttgaaggttccttttcaaacagcagtttccaatcactctttctgtggaatctgcaagtggatatttcgacctctttgaagatttcgttggaaacgggagaatcttcacagaaaagctaaacagaagcattctcagaaacttctctgtgatgtttgtgttcaactcccagagtttcacgttgcttttcatagagtagttctgaaacatgcttttcgtagtgtctgcaagtggacatttggagcgctttcaggcctgtggtggaaaacgaattatggtcacataaaaactggagagaagccttctcagaaacttctctgtgatgattgcattcaactcacagagttgaaccctcctatggatagagcagtgttgaaactctctttttgtggaatctgcaagtggatatgtggacctctccgaagatgtctttggaaacgggaatatcttcacataaaaactaaacagaagcattctcagaaacttcttggtgatgtttgcattcaaatcccagagttgaaccttcctttgatagttcaggtttgaaacactctttctgtaggatctgcaagtggctatttggaccactctgtggccttcgttcgaaacgggtatatcttcgcataaaatctagacagaagcattctcagaaaatactttgtgatgattgagtttaaatcacagagctgaccattcctttggatggagcaggtttgagacacactttttgtagaatctacaagtggatatttggacctctctgaggatttcgttggaaacgggataactgcacctaactaaacggaagcattctcagaaactgctttgtgatgattgcattcacctcacagagttgaacattcctattgatagagcagtttggaaacactcttgttgtggaatgtgcaagtggagatttggagcgctttgaggcctatggtagtaaagggaatagcttcatagaaaaactagacagatgcattctcaggaactttttggtgatgtttgtattcaactcccagagttgaactttcctttggaaagagcagctatgaaacactctttttctagaatctgcaagtggacgtttggagggctttgtggtttgtggtggaaaaggaaatatcttcacctaaatactagatagaagcattctcagaagcttctctgtgatgactgcattcaactcacggagttgaacactccttttgagagcgcagttttgaaactctctttctgtggcatctgcaaggggacatgtagacctctttgaagatttcgttggaaacggaatcatcttcacataaaaactatacagaagcagtctcagaatcttctttgtgatgtttgcattcaaatcccagagttgaactttcctttcaaagttcacgtttgaaacactctttttgcaggatctacaagtggatatttggaccactctgtgtccttcgttcgaaacgggtatatcttcacacgacatctagacagaagctttctcagaaaattctttgggatgattgagtggaactcacagagctgaacattccttgcgatggagcagtttagaaacacactttctgcagaatctgcaagtgcatatttggacctctctgaggaattcgttggaaacgggataatttcagctgactaaacagaagcattctcagaaccttcttcgtgatgtctgcattcaactcacagtgtggaacctttctttgatagttcaggtttgaaacactctttttgtagaaactgcaaggggataattgcacttctttgaggcctaccgtagtaaaggaaataacttcctatagaaagaagacagaagcattctcagaaccctcttcgtgatgtttgcattcaactcacagtgctgaacctttctttgatagttcagctttgaaacactcttcttgtagaaactgcaagtggatatttggtcctctctgaggatttcgttggaaacgggataaaccgcacagaactaaacagaagaattctcagagccctcttcgtgatgtttgcattcaactcacagtgctgaacctttctttgatagtgcagctttgaaacactctttttgtagaaactgcaagtggatatttggtcctctctgaggatttcgttggaaacgggataaaccgcacaaaactaaaacagaagcattcacagaaaactcttggtgacgactgagtttaactcacagagctgaacattcctttggatggagcagtttcgaaacacactatttgtagaatctgcaagtggatatttgggcctctctgaggatttcgttggaaacgggataaaacgcacagaacaaaaacagaagcattctcagaaactactttgtggtgattgcattcaagtcacagagttgaacattccctttgacagagcagtttggaaactctctttgtgtagaatctgcaagtggagatatggaccgctttgaggcctatggtagtaaaggaaataccttcatagaaaagccagacagtagcattctcagaaacttctttgtgatgcttgcattcaactcacagagttgaactttcctttcgagagagaagctttgaaacactctttttccagaatgtgcaagtggacatttggggagctttgaggcctggggtggaaaaggaattatcttcccgtaaaagctagatagaagcattgtcaggaacttctttgtgatgattgcattcaactcacagagttgaaggttccttttcaaacagcagtttccaatcactctttctgtggaatctgcaagtggatatttcgacctctttgaagatttcgttggaaacgggagaatcttcacagaaaagctaaacagaagcattctcagaaacttctctgtgatgtttgtgttcaactcccagagtttcacgttgcttttcatagagtagttctgaaacatgcttttcgtagtgtctgcaagtggacatttggagcgctttcaggcctgtggtggaaaacgaattatggtcacataaaaactggagagaagccttctcagaaacttctctgtgatgattgcattcaactcacagagttgaaccctcctatggatagagcagtgttgaaactctctttttgtggaatctgcaagtggatatgtggacctctccgaagatgtctttggaaacgggaatatcttcacataaaaactaaacagaagcattctcagaaacttcttggtgatgtttgcattcaaatcccagagttgaaccttcctttgatagttcaggtttgaaacactctttctgtaggatctgcaagtggctatttggaccactctgtggccttcgttcgaaacgggtatatcttcgcataaaatctagacagaagcattctcagaaaatactttgtgatgattgagtttaaatcacagagctgaccattcctttggatggagcaggtttgagacacactttttgtagaatctacaagtggatatttggacctctctgaggatttcgttggaaacgggataactgcacctaactaaacggaagcattctcagaaactgctttgtgatgattgcattcacctcacagagttgaacattcctattgatagagcagtttggaaacactcttgttgtggaatgtgcaagtggagatttggagcgctttgaggcctatggtagtaaagggaatagcttcatagaaaaactagacagatgcattctcaggaactttttggtgatgtttgtattcaactcccagagttgaactttcctttggaaagagcagctatgaaacactctttttctagaatctgcaagtggacgtttggagggctttgtggtttgtggtggaaaaggaaatatcttcacctaaatactagatagaagcattctcagaagcttctctgtgatgactgcattcaactcacggagttgaacactccttttgagagcgcagttttgaaactctctttctgtggcatctgcaaggggacatgtagacctctttgaagatttcgttggaaacggaatcatcttcacatcaaaactatacagaagcagtctcagaatcttctttgtgatgtttgcattcaaatcccagagttgagctttcctttcaaagttcacgtttgaaacactctttttgcaggatctacaagtggatatttggaccactctgtgtccttcgttcgaaacgggtatatcttcacatgacatctagacagaagctttctcagaaaattctttgggatgattgagttgagcaaacagagctgaacactccttgcgatgtagcagtttagaaacacactttctgcagaatctgcaactgcatatgtggacctctctgaggaattcgttggaaacgggataatttcagctgactaaacagacgcattctcagaaccttcttcgtgatgtctgcattcaactcacagtgtggaacctttctttgatagttcaggtttgaaacactctttttgtagaaactgcaaggggatcattgcacttctttgaggcctaccttagtaaaggagataacttcctataaaaagaagacagaagcattctcagaaccatcttcgtgatatttgcattcaactcacagtgctgaacctttctttgatagttcagctttgaaactctctttttgtagaaacggcaagtggatatttgggcctctctgaggatttcgttggaaacgggataaaccgcacagaactaaacagaagcattctcagaaccttcttcgtgatgtttgcattcaactcacagtgttgaacctttctttgatagttcaggtttgaaacggtctttctgtagaaactgcaagtagatatttggacctctctgaggatttcgttggaaacgggataacccgcacagaactaaaacagaagcattcacagaaaactcttggtgacgactgagtttaactcacagagctgaacattcctttggatggagcagtttcgaaacacactatttgtagaatgtgcaagtggatatttaggcctctctgaggatttcgttggaaacgggataaaccgcacagaactaaacagaagcattctcagaaactactttgtgatgattgcattcaagtcacagagttgaacattccctttgacagagcagtttggaaactctctttgtgtagaatctgcaagtggagatatggaccgctttgaggcctatggtagtaaaggaaatagcttcatataaaagctagacagtagcattctcagaaacttctttctgatgcttgcattcaactcacagagttgaactttcctttcgagagagaagctttgaaacactctttttccagaatctgcaagtggacatttggagggctttgaggcctgtggtggaaaaggaattatcttcccgtaaaagctagatagaagcattgtcagaaacttctttgtgatgattgcattcaactcacagagttgaaggttccttttcaaagagcagtttccaatcactctttgtgtggaatctgcaagtggatatttggacctattttgaagatttcgttggaaacgggagaatcttcacaggaaagctaaacagaagcattctcagaaacttctctgtgatgtttgtgttcaactcccagagtttcacattgcttttcatagagtagttctgaaacatgcttttcgtagtgtctacaagtggacatttggagcgctttcaggcctgtggtggaaaacgaattatggtcacataaaaactggagagaagccttctcagaaacttctctgtgatgattgcattcaactcacagagttgaaccctcctatggatagagcagtgttgaaactctctttttgtggaatctgcaagtggatatgtggacctctccgaagatgtctttggaaacgggaatatcttcacataaaaacttaacagaagcattctcagaaacttcttggtgatgtttgcattcaaatcccagagttgaaccttcctttgatagttcaggtttgaaacactctttttgtaggatctgcaagtggatatttggaccactctgtggccttcgttcgaaacgggtacatcttcgcataaaatctagacagaagcattctcagaaaatactttgtgatgattgagtttaactcacagagctgaacattcctttggatggagcaggtttgagacacaccttttgtagaatctacaagtggatatttggacctctctgaggatttcgttggaaacgggataactgcacctaactaaacggaagcattctcagaaactgctttgtgatgattgcattcacctcacagagttgaacattcctattgatagagcagtttggaaacactcttgttgtggaatgtgcaagtggagatttggagcgctttgaggcctatggtagtaaagggaatagcttcatagaaaaactagacagatgcattctcaggaactttttggtgatgtttgtattcaactcccagagttgaactttcctttggaaagagcagctatgaaacactctttttctagaatctgcaagtggacgtttggagggctttgtggtttgtggtggaaaaggaaatatcttcacctaaatactagatagaagcattctcagaagcttctctgtgatgactgcattcaactcacggagttgaacactccttttgagagcgcagttttgaaactctctttctgtggcatctgcaaggggacatgtagacctctttgaagatttcgttggaaacggaatcatcttcacataaaaactatacagaagcagtctcagaatcttctttgtgatgtttgcattcaaatcccagagttgaactttcctttcaaagttcacgtttgaaacactctttttgcaggatctacaagtggatatttggaccactctgtgtccttcgttcgaaacgggtatatcttcacacgacatctagacagaagctttctcagaaaattctttgggatgattgagttgaactcacagagctgagcattccttgcgatgtagcagtttagaaacacactttctgcagaatctgcaagtgcatatttggacctctgtgaggaattcgttggaaacgggataatttcagctgactaaacagaagcattctcagaaccttcttcgtgatgtctgcattcaacacaaagtgtggaacttttctttgatagttcaggttttaaaaactctttttgtagaaactgcaaggggataattgcactctttgaggagtaccgtagtaaaggaaataacttcctataaaaagaagacagaagcattctcagaaccctcttcgtgatgtttgcattcaactcacagtgctgaacctttctttgatagttcagctttgaaacactctttttgtagaaactgcaagtgaatatttggtcctctctgaggatttcgttggaaacgggataaaacgcacagaactaaacagaagcattctcagaaccttcttcgtgatgtttgcattcaactcacagtgttgaacctttctttgatagttcaggtttgaaacggtctttctgtagaaactgcaagtagatatttggacctctctgaggatttcgttggaaacgggataaaccgcacagagctaaaacagaagcattcacagaaaactcttggtgacgactgagtttaactcacagagctgaacattcctttggatggagcagtttcgaaacacactatttgtagaatgtgcaagtggatatttgggcctctctgaggatttcgttggaaacgggataaaccgcacagaactaaacagaagcattctcagaaactactttgtgatgattgcattcaagtcacagagttgaacattccctttgacagagcagtttggaaactctctttgtgtagaatctgcaagtggagatatggaccgctttgaggcctatggtagtaaaggaaatagcttcatataaaagctagacagtagcattctcagaaacttctttgtgatgcttgcattcaactcacagagttgaactttcctttcgagagagaagctttgaaacactctttttccagaatctgcaagtggacatttggagggctttgaggcctgtggtggaaaaggaattaacttcccataaaagctagatagaagcattgtcagaaacttctttgtgatgattgcattcaactcacagagatgaaggttcctttacaaacagcagtttccaaacactctttctgtggaatctgcaagtggatatttggacctctttgaagatttcgttggaaacgggagaatcttcacagaaaatctaaacagaagcattctcagaaacttctctgtgatgtttgtgttcaactcccagaatttcacattgcttttcatagagtagttctgaaacatgcttttcgtagtgtctgcaagtggacatttggagcgctttcaagcctgtggtggaaaacgaattatggtcccataaaaactggagagaagccttctcagaaacttctctgtgatgattgcattcaactcacagatttgaaccctcctatggatagagcattgttgaaactctctttttgtggaatctgcaagtggatatgtggacctctccgaagatgtctttggaaacgggaatatcttcacataaaaactaaacagaagcattctcagaaacttcttggtgatgtttgcattcaaatcccagtagttgaaccttcctgtgatagttcaggtttgaaacactctttttgtaggatctgcaagtggatatttggaccactctgtggccttcgttcgaaacgggtacatcttcacataaaatctagacagaagcattctcagaaaatactttgtgatgattgagtttaactcacagagctgaacattcctttggatggagcaggtttgagacacactttttgtagaatctacaagtggatatttggacctctctgaggatttcgttggaaacgcgataactgcacctaattaaacggaagcattcacagaaactactttgtgatgattgcattcacctcacagagttgaacattcctattgatagaacagtttggaaacactcttgttgtggaatgtgcaagtggagatttggagcgctttgaggcctatggtagtaaagggaatagcttcatagaaaaactagacagatgcattctcaggaactttttggtgatgtttgtattcaactcccagagttgaactttcctttggaaagagcagctatgaaacactctttttctagaatctgcaagtggacgtttggagggctttgtggtttgtggtggaaaaggaaatatcttcacctaaatactagatagaagcattctcagaagcttctctgtgatgactgcattcaactcacggagttgaacactccttttgagagcgcagttttgaaactctctttctgtgacatctgcaaggggacatgtagacctctttgaagatttcgttggaaacggaatcatcttcacataaaaactatacagaagcagtctcagaatcttctttgtgatgtttgcattcaaatcccagagttgaactttcctttcaaagttcacgtttgaaacactctttttgcaggatctacaagtggatatttggaccactctgtgtccttcgttcgaaacgggtatatcttcacacgacatctagacagaagctttctcagcaaaattctttgggatgattgagtggaactcacagagctgaacattccttgcgatgtagcagtttagaaacacactttctgcagaatctgcaagtgcatatttggacctctctgaggaattcgttggaaacgggataatttcagctgactaaacagaagcattctcagaaccttcttcgtgatgtctgcattcaactcacagtgtggaacctttctttgatagttcaggtttgaaacactctttttgtagaaactgcaaggggataattgcacttctttgaggcctaccgtagtaaaggaaataacttcctatagaaagaagacagaagcattctcagaaccctcttcgtgatgcttgcattcaactcacagtgctgaacctttctttgatagttcagctttgaaacactcttcttgtagaaactgcaagtggatatttggtcctctctgaggatttcgttggaaacgggataaaccgcacagaactaaacagaagaattctcagagccctcttcgtgatgtttgcattcaactcacagtgctgaacctttctttgatagtgcagctttgaaacactctttttgtagaaactgcaagtggatatttggtcctctctgaggatttcgttggaaacgggataaaccgcacagaactaaaacagaagcattcacagaaaactcttggtgacgactgagtttaactcacagagctgaacattcctttggatggagcagtttcgaaacacactatttgtagaatctgcaagtggatatttgggcctctctgaggatttcgttggaaacgggataaaacgcacagaactaaaacagaagcattctcagaaactactttgtgatgattgcattcaagtcacagagttgaacattccctttgacagaacagtttggaaactctctttgtgtagaatctgcaagtggagatatggaccgctttgaggcctatggtagtaaaggaaatagcttcatataaaagctagacagtagcattctcagaaacttctttgtgatgcttgcattcaactcacagagttgaactttcctttcgagagagaagctttgaaacactctttttccagaatctgcaagtggacatttggagggctttgaggcctgtggtggaaaaggaattatcttcccgtaaaagctagatagaagcattgtcagaaacttctttgtgatgattgcattcaactcacagagttgaaggttccttttcaaacagcagtttccaatcactctttctgtggaatctgcaagtggatatttggacctctttgaagatttcgttggaaacgggagtatcttcacagaaaagctaaacagaagcattctcagaaacttctctgtgatgtttgtgttcaactcccagagtttcacattgcttttcatagagtagttctgaaacatgcttttcgtagtgtctgcaagtggacatttggagcgctttcaggcctgtggtggaaaacgaattatggtcacataaaaactggagagaagccttctcagaaacttctctgtgatgattgcattcaactcacggagttgaaccctcctatggatagagcagtgttgaaactctctttttgtggaatctgcaagtggatatgtggacctctccgaagatgtctttggaaacgggaatatcttcacataaaaactaaacagaagcattctcagaaacttcttggtgatgtttgcattcaaatcccagagttgaaccttcctttgatagttcaggtttgaaacactctttttgtaggacctgcaagtggatatttggaccactctgtggccttcgttcgaaacgggtacatcttcgcataaaatctagacagaagcattctcagaaaatactttgtgatgattgagttgaactcacagagctgaacattcctttggatggagcaggtttgagacacactttttgtagaatctacaagtggatatttggacctctttgaggatttcgttggaaacgggataactgcacctaactaaacggaagcattctcagcaaactgctttgtgatgattgcattcacctcacagcgttgaacattcctattgatagagcagtttggaaacactcttgttgtggaatgtgcaagtggagatttggagcgctttgaggcctgtggtagtaaagggaatagcttcatagaaaaactagacagatgcattctcaggaaccttttggtgatgtttgtattcaactcccagagttgaactttcctttggaaagagcagctatgaaacaccctttttctagaatctgcaagtggacgtttggagggctttgtggtttgtggtggaaaaggaaatatcttcacctaaatactagatagaagcattctcagaagcttctctgtgatgactgcattcaactcacggagttgaacactccttttgagagcgcagttttgaaactctctttctgtggcatctgcaaggggacatgtagacctctttgaagatttcgttggaaacggaatcatcttcacataaaaactatacagaagcagtctcagaatcttctttgtgatgtttgcattcaaatcccagagttgaactttcctttcaaagttcacgtttgaaacactctttttgcaggatctacaagtggatatttggaccactctgtgtccttcgttcgaaacgggtatatcttcacacgacatctagacagaagctttctcagaaaattctttgggatgattgagtggaactcacagagctgaacattccttgcgatgtagcagtttagaaacacactttctgcagaatctgcaagtgcatatttggacctctctgaggaattcgttggaaacgggataatttcagctgactaaacagaagcattctcagaaccttcttcgtgatgtctgcattcaactcacagtgtggaacctttctttgatagttcaggtttgaaacactctttttgtagaaactgcaaggggataattgcacttctttgaggcctaccgtagtaaaggaaataacttcctatagaaagaagacagaagcattctcagaaccctcttcgtgatgtttgcattcaactcacagtgctgaacctttctttgatagttcagctttgaaacactcttcttgtagaaactgcaagtggatatttggtcctctctgaggatttcgttggaaacgggataaaccgcacagaactaaacagaagaattctcagagccctcttcgtgatgtttgcattcaactcacagtgctgaacctttctttgatagtgcagctttgaaacactctttttgtagaaactgcaagtggatgtttggtcctctctgaggatttcgttggaaacgggataaaccgcacagaactaaaacagaagcattgtcagaaacttctttgtgatgattgcattcaactcacagagttgaaggttccttttcaaacagcagtttccaatcactctttctgtggaatctgcaagtggatatttgggcctctctgaggatttcgttggaaacgggataaaacgcacagaactaaaacagaagcattctcagaaacttctctgtgatgtttgtgttcaactcccagagtttcacgttgcttttcatagagtagttctgaaacatgcttttcgtagtgtctgcaagtggacatttggagcgctttcaggcctgtggtggaaaacgaattatggtcacataaaaactggagagaagccttctcagaaacttctctgtgatgattgcattcaactcacagagttgaaccgtcctatggatagagcagtgttgaaactctctttttgtggaatctgcaagtggatatgtggacctctccgaagatgtctttggaaacgggactatcttcacataaaaactaaacagaagcattctcagaaacttcttggtgatgtttgcattcaaatcccagagttgaaccttcctttgatagttcaggtttgaaacactctttttgtaggatctgcaattggctatttagaccactctgtggccttcgttcgaaacgggtatatcttcgcataaaatcctagacagaagcattctcagaaaatactttgtgatgattgagttgaactcacagagctgaacattcctttggatggagcaggtttgagacacactttttgtagaatctacaagtggatatttggacctctctgaggatttcgttggaaacgggataactgcacctaactaaacggaagcattctcagaaactgctttgtgatgattgcattcacctcacagagttgaacattcctatttagagagcagtttggaaacactcttgttgtggaatgtgcaagtggagatttggagcgctttgaggcctatggtagtaaagggaatagcttcatagaaaaactagacagatgcattctcaggaactttttggtgatgtttgtattcaactcccagagttgaactttcctttggaaagagcagctatgaaacactctttttctagaatctgcaagtggacgtttggagggctttgtggtttgtggtggaaaaggaaatatcttcacctaaatactagatagaagcattctcagaagcttctctgtgatgactgcattcaactcacggagttgaacactccttttgagagcgcagttttgaaactctctttctgtggcatctgcaaggggacatgtagacctctttgaagatttcgttggaaacggaatcatcttcacataaaaactatacagaagcagtctcagaatcttctttgtgatgtttgcattcaaatcccagagttgaactttcctttcaaagttcacgtttgaaacactctttttgcaggatctacaagtggatatttggaccactctgtgtccttcgttcgaaacgggtatatcttcacacgacatctagacagaagctttctcagaaaattctttgggatgattgagtggaactcacagagctgaacattccttgcgatgtagcagtttagaaacacactttctgcagaatctgcaagtgcatatttggacctctctgaggaattcgttggaaacgggataatttcagctgactaaacagaagcattctcagaaccttcttcgtgatgtctgcattcaactcacagtgtggaacctttctttgatagttcaggtttgaaacactctttttgtagaaactgcaaggggataattgcacttctttgaggcctaccgtagtaaaggaaataacttcctatagaaagaagacagaagcattctcagaaccctcttcgtgatgtttgcattcaactcacagtgctgaacctttctttgatagttcagctttgaaacactcttcttgtagaaactgcaagtggatatttggtcctctctgaggatttcgttggaaacgggataaaccgcacagaactaaacagaagaattctcagagccctcttcgtgatgtttgcattcaactcacagtgctgaacctttctttgatagtgcagctttgaaacactctttttgtagaaactgcaagtggatgtttggtcctctctgaggatttcgttggaaacgggataaaccgcacagaactaaaacagaagcattgtcagaaacttctttgtgatgattgcattcaactcacagagttgaaggttccttttcaaacagcagtttccaatcactctttctgtggaatctgcaagtggatatttgggcctctctgaggatttcgttggaaacgggataaaacgcacagaactaaaacagaagcattctcagaaacttctctgtgatgtttgtgttcaactcccagagtttcacgttgcttttcatagagtagttctgaaacatgcttttcgtagtgtctgcaagtggacatttggagcgctttcaggcctgtggtggaaaacgaattatggtcacataaaaactggagagaagccttctcagaaacttctctgtgatgattgcattcaactcacagagttgaaccctcctatggatagagcagtgttgaaactctctttttgtggaatctgcaagtggatatgtggacctctccgaagatgtctttggaaacgggaatatcttcacataaaaactaaacagaagcattctcagaaacttcttggtgatgtttgcattcaaatcccagagttgaaccttcctttgatagttcaggtttgaaacactctttctgtaggatctgcaagtggctatttggaccactctgtggccttcgttcgaaacgggtatatcttcgcataaaatctagacagaagcattctcagaaaatactttgtgatgattgagtttaaatcacagagctgaccattcctttggatggagcaggtttgagacacactttttgtagaatctacaagtggatatttggacctctctgaggatttcgttggaaacgggataactgcacctaactaaacggaagcattctcagaaactgctttgtgatgattgcattcacctcacagagttgaacattcctattgatagagcagtttggaaacactcttgttgtggaatgtgcaagtggagatttggagcgctttgaggcctgtggtagcaaagggaatagcttcatagaaaaactagacagatgcattctcaggaactttttggtgatgtttgtattcaactcccagagttgaactttcctttggaaagagcagctatgaaacactctttttctagaatctgcaagtggacgtttggagggctttgtggtttgtggtggaaaaggaaatatcttcacctaaatactagatagaagcattctcagaagcttctctgtgatgactgcattcaactcacggagttgaacactccttttgagagcgtagttttgaaactctctttctgtggcatctgcaaggggacatgtagacctctttgaagatttcgttggaaacggaatcatcttcacataaaaactatacagaagcagtctcagaatcttctttgtgatgtttgcattcaaatcccagagttgaactttcctttcaaagttcacgtttgaaacactctttttgcaggatctacaagtggatatttggaccactctgtgtccttcgttcgaaacgggtatatcttcacaggacatctagacagaagctttctcagaaaattctttgggatgattgagtggaactcacagagctgaacattccttgcgatggagcagtttagaaacacactttctgcagaatctgcaagtgcatatttggacctctctgaggaattcgttggaaacgggataatttcagctgactaaacagaagcattctcagaaccttcttcgtgatgtctgcattcaactcacagtgtggaacctttctttgatagttcaggtttgaaacactctttttgtagaaactgcaaggggataattgcacttctttgaggcctaccgtagtaaaggaaataacttcctatagaaagaagacagaagcattctcagaaccctcttcgtgatgtttgcattcaactcacagtgctgaacctttctttgatagttcagctttgaaacactcttcttgtagaaactgcaagtggatatttggtcctctctgaggatttcgttggaaacgggataaaccgcacagaactaaacagaagaattctcagagccctcttcgtgatgtttgcattcaactcacagtgctgaacctttctttgatagtgcagctttgaaacactctttttgtagaaactgcaagtggatgtttggtcctccctgaggatttcgttggaaacgggataaaccgcacagaactaaaacagaagcattgtcagaaacttctttgtgatgattgcattcaactcacagagttgaaggttccttttcaaacagcagtttccaatcactctttctgtggaatctgcaagtggatatttgggcctctctgaggatttcgttggaaacgggataaaacgcacagaactaaaacagaagcattctcagaaacttctctgtgatgtttgtgttcaactcccagagtttcacgttgcttttcatagagtagttctgaaacatgcttttcgtagtgtctgcaagtggacatttggagcgctttcaggcctgtggtggaaaacgaattatggtcacataaaaactggagagagccttctcagaaacttctctgtgatgattgcattcaactcacagagttgaaccctcctatggatagagcagtgttgaaactctctttttgtggaatctgcaagtggatatgtggacctctccgaagatgtctttggaaacgggaatatcttcacataaaaactaaacagaagcattctcagaaacttcttggtgatgtttgcattcaaatcccagagttgaaccttcctttgatagttcaggtttgaaacactctttctgtaggatctgcaagtggctatttggaccactctgtggccttcgttcgaaacgggtatatcttcgcataaaatctagacagaagcattctcagaaaatactttgtgatgattgagtttaaatcacagagctgaccattcctttggatggagcaggtttgagacacactttttgtagaatctacaagtggatatttggacctctctgaggatttcgttggaaacgggataactgcacctaactaaacggaagcattctcagaaactgctttgtgatgattgcattcacctcacagagttgaacattcctattgatagagcagtttggaaacactcttgttgtggaatgtgcaagtggagatttggagcgctttgaggcctatggtagtaaagggaatagcttcatagaaaaactagacagatgcattctcaggaactttttggtgatgtttgtattcaactcccagagttgaactttcctttggaaagagcagctatgaaacactctttttctagaatctgcaagtggacgtttggagggctttgtggtttgtggtggaaaaggaaatatcttcacctaaatactagatagaagcatcctcagaagcttctctgtgatgactgcattcaactcacggagttgaacactccttttgagagcgcagttttgaaactctctttctgtggcatctgcaaggggacatgtagacctctttgaagatttcgttggaaacggaatcatcttcacataaaaactatacagaagcagtctcagcaatcttctttgtgatgtttgcattcaaatccccgagttgaactttcctttcaaagttcacgtttgaaacactctttttgcaggatctacaagtggatatttggaccactctgtgtccttcgttcgaaacgggtatatcttcacatgacatctagacagaagctttctcagaaaattctttgggatgattgagttgaactcacagagctgagcattccttgcgatgtagcagtttagaaacacactttctgcagaatctgcaagtgcatatttgggacctctgtgaggaattcgttggaaacgggataatttcagctgactaaacagaagcattctcagaaccttcttcgtgatgtctgcattcaactcacagtgtggaacctttctttgatagttcaggtttgaaacactctttttgtagaaactgcaaggggataattgcacttctttgaggcctaccgtagtaaaggaaataacttcctataaaaagaagacagaagaattctcagagccctcttcgtggtgtttgcattcaactcacagtgctgaacctttctttgatagtgcagctttgaaacactctttttgtagaaactgcaagtggatatttggtcctctctgaggatttcgttggaaacgggataaaccgcacagaactaaagagaagcattcacagaaaactcttggtgacgactgagtttaactcacagagctgaacattcctttggatggagcagtttcgaaacacactatttgtagaatctgcaagtggatatttgggcctctctgaggatttcgttggaaacgggataaaacgcacagaactaaaacagaagcattctcagaaactactttgtgatgattgcattcaagtcacagagttgaacattccctttgacagagcagtttggaaactctctttgtgtagaatctgcaagtggagatatggaacgctttgaggcctatggtagtaaaggaaatagcttcatataaaagctagacagtagcattctcagaaacttctttgtgatgcttgcattcaactcacagagttgaactttcctttcgagagagaagctttgaaacactctttttccagaatgtgcaagtggacatttggggagctttgaggcctgtggtggaaaaggaattatcttcccgtaaaagctagatagaagcattgtcagaaacttctttgtgatgattgcattcaactcacagagttgaaggttccttttcaaacagcagtttccaatcactctttctgtggaatctgcaagtggatatttcgacctctttgaagatttcgttggaaacgggagaatcttcacagaaaagctaaacagaagcattctcagaaacttctctgtgatgtttgtgttcaactcccagagtttcacgttgcttttcatagagtagttctgaaacatgcttttcgtagtgtctgcaagtggacatttggagcgctttcaggcctgtggtggaaaacgaattatggtcacataaaaactggagagaagccttctcagaaacttctctgtgatgattgcattcaactcacagagttgaaccctcctatggatagagcagtgttgaaactctctttttgtggaatctgcaagtggatatgtggacctctccgaagatgtctttggaaacgggaatatcttcacataaaaactaaacagaagcattctcagaaacttcttggtgatgtttgcattcaaatcccagagttgaaccttcctttgatagttcaggtttgaaacactctttctgtaggatctgcaagtggctatttggaccactctgtggccttcgttcgaaacgggtatatcttcgcataaaatctagacagaagcattctcagaaaatactttgtgatgattgagtttaaatcacagagctgaccattcctttggatggagcaggtttgagacacactttttgtagaatctacaagtggatatttggacctctctgaggatttcgttggaaacgggataactgcacctaactaaacggaagcattctcagaaactgctttgtgatgattgcattcacctcacagagttgaacattcctattgatagagcagtttggaaacactcttgttgtggaatgtgcaagtggagatttggagcgctttgaggcctatggtagtaaagggaatagcttcatagaaaaactagacagatgcattctcaggaactttttggtgatgtttgtattcaactcccagagttgaactttcctttggaaagagcagctatgaaacactctttttctagaatctgcaagtggacgtttggagggctttgtggtttgtggtggaaaaggaaatatcttcacctaaatactagatagaagcattctcagaagcttctctgtgatgactgcattcaactcacggagttgaacactccttttgagagcgcagttttgaaactctctttctgtggcatctgcaaggggacatgtagacctctttgaagatttcgttggaaacggaatcatcttcacataaaaactatacagaagcagtctcagaatcttctttgtgatgtttgcattcaaatcccagagttgaactttcctttcaaagttcacgtttgaaacactctttttgcaggatctacaagtggatatttggaccattctgtgtccttcgtttgaaacgggtatatcttcacatgacatctagacagaagctttctcagaaaattctttgggatgattgagtggaactcacagagctgaacattccttgcgatgtagcagtttagaaacacactttctgcagaatctgcaagtgcatatttggacctctctgaggaattcgttggaaacgggataatttcagctgactaaacagaagcattctcagaaccttcttcgtgatgtctgcattcaactcacagtgtggaacctttctttgatagttcaggtttgaaacactctttttgtagaaactgcaaggggataattgcacttctttgaggcctaccgtagtaaaggaaataacttcctatagaaagaagacagaagcattctcagaaccctcttcgtgatgtttgcattcaactcacagtgctgaacctttctttgatagttcagctttgaaacactcttcttgtagaaactgcaagtggatatttggtcctctctgaggatttcgttggaaacgggataaaccgcacagaactaaacagaagcattctcagagccctcttcgtgatgtttgcattcaactcacagtgctgaacctttctttgatagtgcagctttgaaacactctttttgtagaaagtgcaagtggatgtttggtcctctctgaggatttcgttggaaacgggataaaccgcacagaactaaaacagaagcattgtcagaaacttctttgtgatgattgcattcaactcacagagttgaaggttccttttcaaacagcagtttccaatcactctttctgtggaatctgcaagtggatatttgggcctctactgaggatttcgttggaaacgggataaaacgcacagaactaaaacagaagcattctcagaaacttctctgtgatgtttgtgttcaactcccagagtttcacgttgcttttcatagagtagttctgaaacatgcttttcgtagtgtctgcaagtggacatttggagcgctttcaggcctgtggtggaaaacgaattatggtcacataaaaactggagagaagccttctcagaaacttctctgtgatgattgcattcaactcacagagttgaaccctcctatggatagagcagtgttgaaactctctttttgtggaacctgcaagtggatatgtggacctctccgaagatgtctttggaaacgggaatatcttcacataaaaactaaacagaagcattctcagaaacttcttggtgatgtttgcattcaaatcccagagttgaaccttcctttgatagttcaggtttgaaacactctttctgtaggatctgcaagtggctatttggaccactctgtggccttcgttcgaaacgggtatatcttcgcataaaatctagacagaagcattctcagaaaatactttgtgatgattgagtttaaatcacagagctgaccattcctttggatggagcaggtttgagacacactttttgtagaatctacaagtggatatttggacctctctgaggatttcgttggaaacgggataactgcacctaactaaacggaagcattctcagaaactgctttgtgatgattgcattcacctcacagagttgaacattcctattgatagagcagtttggaaacactcttgttgtggaatgtgcaagtggagatttggagcgctttgaggcctatggtagtaaagggaatagcttcatagaaaaactagacagatgcattctcaggtaactttttggtgatgtttgtattcaactcccagagttgaactttcctttggaaagagcagctatgaaacactctttttctagaatctgcaagtggacgtttggagggctttgtggtttgtggtggaaaaggaaatatcttcacctaaatactagatagaagcattctcagaagcttctctgtgatgactgcattcaactcacggagttgaacactccttttgagagcgcagttttgaaactctccttctgtggcatccgcaaggggacatgtggacctctttgaagatttcgttggaaacggaatcatcttcacataaaaactatacagaagcagtctcagaatcttctttgtgatgtttgcattcaaatcccagagttgaacttgcctttcaaagttcacgtttgaaacactctttttgcaggatctacaagtggatatttggaccactctgtgtccttcgttcgaaacgggtatatcttcacatgacatctagacagaagctttctcagaaaattctttgggatgattgagtggaactcacagagctgaacattccttgcgatgtagcagtttagaaacacactttctgcagaatctgcaagtgcatatttggacctctctgaggaattcgttggaaacgggataatttcagctgactaaacagaagcattctcagaaccttcttcgtgatgtctgcattcaactcacagtgtggaacctttctttgatagttcaggtttgaaacactctttttgtagaaactgcaaggggataattgcacttctttgaggcctaccgtagtaaaggaaataacttcctatagaaagaagacagaagcattctcagaaccctcttcgtgatgtttgcattcaactcacagtgctgaacctttctttgatagttcagctttgaaacactcttcttgtagaaactgcaagtggatatttggtcctctctgaggatttcgttggaaacgggataaaccgcacagaactaaacagaagaattctcagagccctcttcgtgatgtttgcattcaactcacagtgctgaacctttctttgatagtgcagctttgaaacactctttttgtagaaactgcaagtggatgtttggtcctctctgaggatttcgttggaaacgggataaaccgcacagaactaaaacagaagcattgtcagaaacttctttgtgatgattgcattcaactcacagagttgaaggttccttttcaaacagcagtttccaatcactctttctgtggaatctgcaagtggatatttgggcctctctgaggatttcgttggaaacgggataaaacgcacagaactaaaacagaagcattctcagaaacttctctgtgatgtttgtgttcaactcccagagtttcacgttgcttttcatagagtagttctgaaacatgcttttcgtagtgtctgcaagtggacatttggagcgctttcaggcctgtggtggaaaacgaattatggtcacataaaaactggagagaagccttctcagaaacttctctgtgatgattgcattcaactcacagagttgaaccctcctatggatagagcagtgttgaaactctctttttgtggaatctgcaagtggatatgtggacctctccgaagatgtctttggaaacgggaatatcttcacataaaaactaaacagaagcattctcagaaacttcttggtgatgtttgcattcaaatcccagagttgaaccttcctttgatagttcaggtttgaaacactctttttgtaggatctgcaagtggatatttggaccactctgtggccttcgttcgaaacgggtatatcttcgcataaaatctagacagaagcattctcagaaaatactttgtgatgattgagtttaactcacagagctgaacattcctttggatggagcaggtttgagacacactttttgtagaatctacaagtggatatttggacctctctgaggatttcgttggaaacgggataactgcacctaactaaacggaagcattctcagaaactgctttgtgatgattgcattcacctcacagagttgaacattcctattgatagagcagtttggaaacactcttgttgtggaatgtgcaagtggagatttggagcgctttgaggcctatggtagtaaagggaatagcttcatagaaaaactagacagatgcattctcaggaactttttggtgatgtttgtattcaactcccagagttgaactttcctttggaaagagcagctatgaaacactctttttctagaatctgcaagtggacgtttggagggctttgtggtttgtggtggaaaaggaaatatcttcacctaaatactagatagaagcattctcagaagcttctctgtgatgactgcattcaactcacggagttgaacactccttttgagagcgcagttttgaaactctctttctgtggcatctgcaaggggacatgtagacctctttgaagatttcgttggaaacggaatcatcttcacataaaaactatacagaagcagtctcagaatcttctttgtgatgtttgcattcaaatcccagagttgaactttcctttcaaagttcacgtttgaaacactctttttgcaggatctacaagtggatatttggaccactctgtgtccttcgttcgaaacgggtatatcttcacacgacatctagagagaagctttctcagaaaattctttgggatgattgagtggaactcacagagctgaacattccttgcgatggagcagtttagaaacacactttctgcagaatctgcaagtgcatatttggacctctctgaggaattcgttggaaacgggataatttcagctgactaaacagaagcattctcagaaccttcttcgtgatgtctgcattcaactcacagtgtggaacctttctttgatagttcaggtttgaaacactctttttgtagaaactgcaaggggataattgcacttctttgaggcctaccgtagtaaaggaaataacttcctatagaaagaagacagaagcattctcagaaccctcttcgtgatgtttgcattcaactcacagtgctgaacctttctttgatagttcagctttgaaacactcttcttgtagaaactgcaagtggatatttggtcctctctgaggatttcgttggaaacgggataaaccgcacagaactaaacagaagaattctcagagccctcttcgtgatgtttgcattcaactcacagtgctgaacctttctttgatagtgcagctttgaaacactctttttgtagaaactgcaagtggatgtttggtcctctctgaggatttcgttggaaacgggataaaccgcacagaactaaaacagaagcattgtcagaaacttctttgtgatgattgcattcaactcacagagttgaaggttccttttcaaacagcagtttccaatcactctttctgtggaatctgcaagtggatatttgggcctctctgaggatttcgttggaaacgggataaaacgcacagaactaaaacagaagcattctcagaaacttctctgtgatgtttgtgttcaactcccagagtttcacgttgcttttcatagagtagttctgaaacatgcttttcgtagtgtctgcaagtggacatttggagcgctttcaggcctgtggtggaaaacgaattatggtcacataaaaactggagagaagccttctcagaaacttctctgtgatgattgcattcaactcacagagttgaaccctcctatggatagagcagtgttgaaactctctttttgtggaatctgcaagtggatatgtggacctctccgaagatgtctttggaaacgggaatatcttcacataaaaactaaacagaagcattctcagaaacttcttggtgatgtttgcattcaaatcccagagttgaaccttcctttgatagttcaggtttgaaacactctttttgtaggatctgcaagtggctatttggaccactctgtggccttcgttcgaaacgggtatatcttcgcataaaatctagacagaagcattctcagaaaatactttgtgatgattgagtttaaatcacagagctgaccattcctttggatggagcaggtttgagacacactttttgtagaatctacaagtggatatttggacctctctgaggatttcgttggaaacgggataactgcacctaactaaacggaagcattctcagaaactgctttgtgatgattgcattcacctcacagagttgaacattcctattgatagagcagtttggaaacactcttgttgtggaatgtgcaagtggagatttggagcgctttgaggcctatggtagtaaagggaatagcttcatagaaaaactagacagatgcattctcaggaactttttggtgatgtttgtattcaactcccagagttgaactttcctttggaaagagcagctatgaaacactctttttctagaatctgcaagtggacgtttggagggctttgtggtttgtggtggaaaaggaaatatcttcacctaaatactagatagaagcattctcagaagcttctctgtgatgactgcattcaactcacggagttgaacactccttttgagagcgcagttttgaaactctctttctgtggcatctgcaaggggacatgtagacctctttgaagatttcgttggaaacggaatcatcttcacataaaaactatacagaagcagtctctgaatcttctttgtgatgtttgcattcaaatcccagagttgaacttccctttcaaagttcacgtttgaaacactctttttgcaggatctacaagtggatatttggaccactctgtgtccttcgttcgaaacgggtatatcttcacatgacatctagacagaagctttctcagaaaattctttgggatgattgagtggaactcacagagctgaacattccttgcgatgtagcagtttagaaacacactttctgcagaatctgcaagtgcatatttggacctctctgaggaattcgttggaaacgggataatttcagctgactaaacagaagcattctcagaacttcttcgtgatgtctgcattcaactcacagtgtggaacctttctttgatagttcaggtttgaaacactctttttgtagaaactgcaaggggataattgcacttctttgaggcctaccgtagtaaaggaaataacttcctatagaaagaagacagaagcattctcagaaccctcttcgtgatgtttgcattcaactcacagtgctgaacctttctttgatagttcagctttgaaacactcttcttgtagaaactgcaagtggatatttggtcctctctgaggatttcgttggaaacgggataaaccgcacagaactaaacagaagaattctcagagccctcttcgtgatgtttgcattcaactcacagtgctgaacctttctttgatagtgcagctttgaaacactctttttgtagaaactgcaagtggatgtttggtcctctctgaggatttcgttggaaacgggataaaccgcacagaactaaaacagaagcattgtcagaaacttctttgtgatgattgcattcaactcacagagttgaaggttccttttcaaacagcagtttccaatcactctttctgtggaatctgcaagtggatatttgggcctctctgaggatttcgttggaaacgggataaaacgcacagaactaaaacagaagcattctcagaaacttctctgtgatgtttgtgttcaactcccagagtttcacgttgcttttcatagagtagttctgaaacatgcttttcgtagtgtctgcaagtggacatttggagcgctttcaggcctgtggtggaaaacgaattatggtcacataaaaactggagagaagccttctcagaaacttctctgtgatgattgcattcaactcacagagttgaaccctcctatggatagagcagtgttgaaactctctttttgtggaatctgcaagtggatatgtggacctctccgaagatgtctttggaaacgggaatatcttcacataaaaactaaacagaagcattctcagaaacttcttggtgatgtttgcattcaaatcccagagttgaaccttcctttgatagttcaggtttgaaacactctttctgtaggatctgcaagtggctatttggaccactctgtggccttcgttcgaaacgggtatatcttcgcataaaatctagacagaagcattctcagaaaatactttgtgatgattgagtttaaatcacagagctgaccattcctttggatggagcaggtttgagacacactttttgtagaatctacaagtggatatttggacctctctgaggatttcgttggaaacgggataactgcacctaactaaacggaaagcattctcagaaactgctttgtgatgattgcattcacctcacaggagttgaacattcctattgatagagcagtttggaaacactcttgttgtggaatgtgcaagtggagatttggagcgctttgaggcctgtggtagtaaagggaatagcttcatagaaaaactagacagatgcattctcaggaactttttggtgatgtttgtattcaactcccagagttgaactttcctttggaaagagcagctatgaaacactctttttctagaatctgcaagtggacgtttggagggctttgtggtttgtggtggaaaaggaaatatcttcacctaaatactagatagaagcattctcagaagcttctctgtgatgactgcattcaactcacggagttgaacactccttttgagagcgcagttttgaaactctctttctgtggcatctgcaaggggacatgtagacctctttgaagatttcgttggaaacggaatcatcttcgcataaaaactatacagaagcagtctcagaatcttctttgtgatgtttgcattcaaatcccagagttgaacttccctttcaaagttcacgtttgaaacactctttttgcaggatctacaagtggatatttggaccactctgtgtccttcgttcgaaacgggtatatcttcacatgacatctagacagaagctttctcagaaaatcctttgggatgattgagtggaactcacagagctgaacattccttgcgatgtagcagtttagaaacacactttctgcagaatctgcaagtgcatatttggacctctctgaggaattcgttggaaacgggataatttcagctgactaaacagaagcattctcagaaccttcttcgtgatgtctgcattcaactcacagtgtggaacctttctttgatagttcaggtttgaaacactctttttgtagaaactgcaaggggataattgcacttctttgaggcctaccgtagtaaaggaaataacttcctatagaaagaagacagaagcattctcagaaccctcttcgtgatgtttgcattcaactcacagtgctgaacctttctttgatagttcagctttgaaacactcttcttgtagaaactgcaagtggatatttggtcctctctgaggatttcgttggaaacgggataaaccgcacagaactaaacagaagaattctcagagccctcttcgtgatgtttgcattcaactcacagtgctgaacctttctttgatagtgcagctttgaaacactctttttgtagaaactgcaagtggatgtttggtcctctctgaggatttcgttggaaacgggataaaccgcacagaactaaaacagaagcattgtcagaaacttctttgtgatgattgcattcaactcacagagttgaaggttccttttcaaacagcagtttccaatcactctttctgtggaatctgcaagtggatatttgggcctctctgaggatttcgttggaaacgggataaaacgcacagaactaaaacagaagcattctcagaaacttctctgtgatgtttgtgttcaactcccagagtttcacgttgcttttcatagagtagttctgaaacatgcttttcgtagtgtctgcaagtggacatttggagcgctttcaggcctgtggtggaaaacgaattatggtcacataaaaactggagagaagccttctcagaaacttctctgtgatgattgcattcaactcacagagttgaaccctcctatggatagagcagtgttgaaactctctttttgtggaatctgcaagtggatatgtggacctctccgaagatgtctttggaaacgggaatatcttcacataaaaactaaacagaagcattctcagaaacttcttggtgatgtttgcattcaaatcccagagttgaaccttcctttgatagttcaggtttgaaacactctttctgtaggatctgcaagtggctatttggaccactctgtggccttcgttcgaaacgggtatatcttcgcataaaatctagacagaagcattctcagaaaatactttgtgatgattgagtttaaatcacagagctgaccattcctttggatggagcaggtttgagacacactttttgtagaatctacaagtggatatttggacctctctgaggatttcgttggaaacgggataactgcacctaactaaacggaagcattctcagaaactgctttgtgatgattgcattcacctcacagagttgaacattcctattgatagagcagtttggaaacactcttgttgtggaatgtgcaagtggagatttggagcgctttgaggcctgtggtagtaaagggaatagcttcatagaaaaactagacagatgcattctcaggaaccttttggtgatgtttgtattcaactcccagagttgaactttcctttggaaagagcagctatgaaacactctttttctagaatctgcaagtggacgtttggagggctttgtggtttgtggtggaaaaggaaatatcttcacctaaatactagatagaagcattctcagaagcttctctgtgatgactgcattcaactcacggagttgaacactccttttgagagcgcagttttgaaactctctttctgtggcatctgcaaggggacatgtagacctctttgaagatttcgttggaaacggaatcatcttcacataaaaactatacagaagcagtctcagaatcttctttgtgatgtttgcattcaaatcccagagttgaactttcctttcaaagttcacgtttgaaacactctttttgcaggatctacaagtggatatttggaccactctgtgtccttcgttcgaaacgggtatatcttcacacgacatctagacagaagctttctcagaaaattctttgggatgattgagtggaactcacagtagctgaacattccttgcgatggagcagtttagaaacacactttctgcagaatctgcaagtgcatatttggacctctctgaggaattcgttggaaacgggataatttcagctgactaaacagaagcattctcagaaccttcttcgtgatgtctgcattcaactcacagtgtggaacctttctttgatagttcaggtttgaaacactctttttgtagaaactgcaaggggataattgcacttctttgaggcctaccgtagtaaaggaaataacttcctatagaaagaagacagaagcattctcagaaccctcttcgtgatgtttgcattcaactcacagtgctgaacctttctttgatagttcagctttgaaacactcttcttgtagaaactgcaagtggatatttggtcctctctgaggatttcgttggaaacgggataaaccgcacagaactaaacagaagcattctcagaaccttcttcgtgatgtttgcattcaactcacagtgttgaacctttctttcatagttcaggtttgaaacggtctttctgtagaaactgcaagtagatatttggacctctctgaggatttcgttggaaacgggataaaccgcacagaactaaaacagaagcattcacagaaaactcttggtgacgactgagtttaactcacagagctgaacattcctttggatggagcagtttcgaaacacactatttgtagaatgtgcaagtggatatttgggcctctctgaggatttcgttggaaacgggataaaccgcacagaactaaacagaagcattctcagaaactactttgtgatgattgcattcaagtcacagagttgaacattccctttgacagagcagtttggaaactctctttgtgtagaatctgcaagtggagatatggaccgctttgaggcctatggtagtaaaggaaatagcttcatataaaagctagacattagcattctcagaaacttctttgtgatgcttgcattcaactcacagagttgaactttcctttcgagagagaagctttgaaacactctttttccagaatctgcaagtggacatttggagggctttgaggcctgtggtggaaaaggaattatcttcccgtaaaagctagatagaagcattgtcagaaacttctttgtgatgattgcattcaactcacagagttgaaggttccttttcaaacagcagtttccaaacactctttctgtggtatctacaagtggatatttggacctctttgaagatttcgttggaaacgggagaatcttcacagaaaagctaaacagaagcattctcagaaacttctctgtgatgtttgtgttcaactcccagagtttcatattgcttttcatagagtagttctgaaacatgcttttcgcagtgtctgcaagtggacatttggagcgctttcaggcctgtggtggaaaacgaattatggtcacataaaaactggagagaagccttctcagaaacttctctgtgatgattgcattcaactcacagagttgaaccctcctatggatagagcagtgttgaaactctctttttgtggaatctgcaggtggatatgtgcacctctctgaagatgtctttggaaacgggaatatcttcacataaaaactaaacagaagcattctcagaaacttcttggtgatgtttgcattcaaatcccagagttgaaccttcctttgatagttcaggtttgaaacactctttttgtaggatctgcaagtggatatttggaccactctgtggccttcgttcgaaacgggtatatcttcgcataaaatctagacagaagcattctcagaaaatactttgtgatgattgagtttaactcacagagctgaaaattcctttggatggagcaggtttgagacacactttttgtagaatctacaagtggatatttggacctctctgaggatttccttggaaacgggataactgcacctaactaaacggaagcattctcagaaactgctttgtgatgattgcattcacctcacagagttgaacattcctattgatagagcagtttggaaacactcttgttgtggaatgtgcaagtggagatttggagcgctttgaggcctatggtagtaaagggaatagcttcatagaaaaactagacagatgcattctcaggaactttttggtgatgtttgtattcaactcccagagttgaactttcctttggaaagagcagctatgaaacactctttttctagaatctgcaagtggacgtttggagggctttgtggtttgtggtggaaaaggaaatatcttcacctaaatactagatagaagcattctcagaagcttctctgtgatgactgcattcaactcacggagttgaacactccttttgagagcgcagttttgaaactctctttctgtggcatctgcaaggggacatgtagacctctttgaagatttcgctggaaacggaatcatcttcacataaaaactatacagaagcagtctcagaatcttctttgtgatgtttgcattcaaatcccagagttgaactttcctttcaaagttcacgtttgaaacactctttttgcaggatctacaagtggatatttggaccactctgtgtccttcgttcgaaacgggtataacttcacacgacatctagacagaagctttctcagaaaattctttgggatgattgagtggaactcacagagctgaacattccttgcgatgtagcagtttagaaacacactttctgcagaatctgcaagtgcatatttggacctctctgaggaattcgttggaaacgggataatttcagctgactaaacagaagcattctcagaaccttcttcgtgatgtctgcattcaactcacagtatggaacctttctttgatagttcaggtttgaaacactctttttgtagaaactgcaaggggataattgcacttctttgaggcctaccgtagtaaaggaaataacttcctatagaaagaagacagaagcattctcagaaccctcttcgtgatgtttgcattcaactcacagtgctgaacctttctttgatagttcagctttgaaacactcttcttgtagaaactgcaagtggatatttggtcctctctgaggatttcgttggaaacgggataaaccgcacagaactaaacagaagaattctcagagccctcttcgtgatgtttgcattcaactcacagtgctgaacctttctttgatagtgcagctttgaaacactctttttgtagaaactgcaagtggatgtttggtcctctctgaggatttcgttggaaacgggataaaccgcacagaactaaaacagaagcattgtcagaaacttctttgtgatgattgcattcaactcacagagttgaaggttccttttcaaacagcagtttccaatcactctttctgtggaatctgcaagtggatatttgggcctctctgaggatttcgttggaaacgggataaaacgcacagaactaaaacagaagcattctcagaaacttctctgtgatgtttgtgttcaactcccagagtttcacgttgcttttcatagagtagttctgaaacatgcttttcgtagtgtctgcaagtggacatttggagcgctttcaggcctgtggtggaaaacgaattatggtcacataaaaactggagagaagccttctcagaaacttctctgtgatgattgcattcaactcacagagttgaaccctcctatggatagagcagtgttgaaactctctttttgtggaatctgcaagtggatatgtggacctctccgaagatgtctttggaaacgggaatatcttcacataaaaactaaacagaagcattctcagaaacttcttggtgatgtttgcattcaaatcccagagttgaaccttcctttgatagttcaggtttgaaacactctttctgtaggatctgcaagtggctatttggaccactctgtggccttcgttcgaaacgggtatatcttcgcataaaatctagacagaagcattctcagaaaatactttgtgatgattgagtttaaatgacagagctgaccattcctttggatggagcaggtttgagacacactttttgtagaatctacaagtggatatttggacctctctgaggatttcgttggaaacgggataactgcacctaactaaacggaagcattctcagaaactgctttgtgatgattgcattcacctcacagagttgaacattcctattgatagagcagtttggaaacactcttgttgtggaatgtgcaagtggagatttggagcgctttgaggcctatggtagtaaagggaatagcttcatagaaaaactagacagatgcattctcaggaactttttggtgatgtttgtattcaactcccagagttgaacttccctttggaaagagcagctatgaaacacgctttttctagaatctgcaagtggacgtttggagggctttgtggtttgtggtctaaaaggaaatatcttcacctaaatactagatagaagcattctcagaagcttctctgtgatgactgcattcaactcacggagttgaacactccttttgagagcgcagttttgaaactctctttctgtggcatccgcaaggggaaatgtggacctctttgaagatttcgttggaaacggaatcatcttcacataaaaactgtacagaagcagtctcagaatcttctttgtgatgtttgcattcaaatcccagagttgaactttcctttcaaagttcacgtttgaaacactctttttgcaggatctacaagtggatatttggaccactctgtgtccttcgttcgaaacgggtatatcttcacacgacatctagacagaagctttctcagaaaattctttgggatgattgagtggaactcacagagctgaacattccttgcgatgtagcagtttagaaacacactttctgcagaatctgcaagtgcatatttggacctctctgaggaattcgttggaaacgggataatttcagctgactaaacagaagcattctcagaaccttcttcgtgatgtctgcattcaactcacagtgtggaacctttctttgatagttcaggtttgaaacactctttttgtagaaactgcaaggggataattgcacttctttgaggcctaccgtagtaaaggaaataacttcctatagaaagaagacagaagcattctcagaaccctcttcgtgatgtttgcattcaactcacagtgctgaacctttatttgatagttcagctttgaaacactcttcttgtagaaactgcaagtggatatttggtcctctctgagtatttcgttggaaacgggataaaccgcacagaactaaacagaagaattctcagagccctcttcgtgatgtttgcattcaactcacagtgctcaacctttctttgatagtgcagctttgaaacactctttttgtagaaactgcaagtggatatttggtcctctctgaggatttcgttggaaacgggataaaccgcacagaactaaaacagaagcattctcagaaccttcttcgtgatgtttgcattcaactcacagtgttgaacctttctttgatagttcaggttggaaacggtctttctgtagaaactgcaagtagatatttggacctctctgaggatttcgttggaaacgggataaaccgcacagaactaaaacagaagcattcacagaaaactcttggtgacgactgagtttaactcacagagctgaacattcctttggatggagcagtttcgaaacacactatttgtagaatgtgcaagtggatatgtgggcctctctgaggatttcgttggaaaagggataaaccgcacagaactaaacagaagcattctcagaaactactttgtgatgattgcattcaagtcacagagttgaacattccctttgacagagcagtttggaaactctctttgcgtagaatctgcaagtggagatatggaccgctttgaggcctatggtagtaaaggaaatagcttcatataaaagctagacagcagcattctcagaaacttctttgtgatgcttgcattcaactcacagagttgaactttcctttcgagagagaagctttgaaacactctttttccagaatctgcaagtggacatttggagggctttgaggcctgtggtggaaaaggaattatcttcccgtaaaagctagatagaagcattgtcagaaacttctttgaatgattgcattcaactcacagagttgaaggttgcttttcaaagagcagtttccaatcactctttctgtggaatctgcaagtggatatttgggcctctttgaagatttcgttggaaacgggataatcatcacagaaaagctaaacagaagcattctcagaaacttctctgtgatgtttgtgttcaactcccagagtttcacattgcttctcatagagtagttctgaaacatgcttttcgtagtgtctgcaagtggacatttggagcgctttcaggcctgtggtggaaaacgaattatggtcacataaaaactggagagaagccttctcagaaacttctctgtgatgattgcattcaactcacagagttgaaccctcctatggatagagcagtgttgaaactctctttttgtggaatctgcaagcggatatgtggacctctccgaagatgtctttggcaacgggaatatcttcacataaaaactaaacagaagcattctcagaaacttcttggtgatgtttgcattcaaatcccagagttgaaccttcctttgagagttcaggtttgaaacactctttttgtaggatctgcaagtggatatttggaccactctgtggccttcgttcgaaacgggtacatcttcgcataaaatctagacagaagcattctcagaaaatactttgtgatgattgagttaaaatcacagagctgaacattcctttggatggagcaggtttgagacacactttttgtagaatctacaagtggatatttggacctctctgaggatttcgttggaaacgggataactgcacctaactaaacggaagcattctcagaaactgctttgtgatgattgcattcacctcacagagttgaacattcctattgatagagcagtttggaaacactcttgttgcggaatgtgcaagtggagatttggagcgctttgaggcctgtggtagtaaagggaatagcttcatagaaaaactagacagatgcattctcaggaactttttggtgatgtttgtattcaactcccagagttgaactttcctttggaaagagcagctatgaaacactctttttctagaatctgcaagtggacgtttggagggctttgtggtttgtggtggaaaaggaaatatcttcacctaaatactagatagaagcattctcagaagcttctctgtgatgactgcattcaactcacggagttgaacactccttttgagagcgcagttttgaaactctctttctgtggcatctgcaaggggacatgtagacctctttgaagatttcgttggaaacggaatcatcttcacataaaaactatacagaagcagtctcagaatcttctttgtgatgtttgcattcaaatcccagagttgaactttcctttcaaagttcacgtttgaaacactctttttgcaggatctacaagtggatatttggaccactctgtgtccttcgttcgaaacgggtatatcttcacacgacatctagacagaagctttctcagaaaattctttgggatgattgagtggaactcacagagctgaacattccttgcgatgtagcagtttagaaacacactttctgcagaatctgcaagtgcatatttggacctctctgaggaattcgttggaaacgggataatttcagctgactaaacagaagcattctcagaaccttcttcgtgatgtctgcattcaactcacagtgtggaacctttctttgatagttcaggtttgaaacactctttttgtagaaactgcaaggggataattgcacttctttgaggcctaccgtagtaaaggaaataacttcctatagaaagaagacagaagcattctcagaaccctcttcgtgatgtttgcattcaactcacagtgctgaacctttctttgatagttcagctttgaaacactcttcttgtagaaactgcaagtggatatttggtcctctctgaggatttcgttggaaacgggataaaccgcacagaactaaacagaagaattctcagagccctcttcgtgatgtttgcattcaactcacagtgctgaacctttctttgatagtgcagctttgaaacactctttttgtagaaactgcaagtggatgtttggtcctctctgaggatttcgttggaaacgggataaaccgcacagaactaaaacagaagcattgtcagaaacttctttgtgatgattgcattcaactcacagagttgaaggttccttttcaaacagcagtttccaatcactctttctgtggaatctgcaagtggatatttgggcctctctgaggatttcgttggaaacgggataaaacgcacagaactaaaacagaagcattctcagaaacttctctgtgatgtttgtgttcaactcccagagtttcacgttgcttttcatagagtagttctgaaacatgcttttcgtagtgtctgcaagtggacatttggagcgctttcaggcctgtggtggaaaacgaattatggtcacataaaaactggagagaagccttctcagaaacttctctgtgatgattgcattcaactcacagagttgaaccctcctatggatagagcagtgttgaaactctctttttgtggaatctgcaagtggatatgtggacctctccgaagatgtctttggaaacgggaatatcttcacataaaaactaaacagaagcattctcagaaacttcttggtgatgtttgcattcaaatcccagagttgaaccttcctttgatagttcaggtttgaaacactctttctgtaggatctgcaagtggctatttggaccactctgtggccttcgttcgaaacgggtatatcttcgcataaaatctagacagaagcattctcagaaaatactttgtgatgattgagtttaaatcacagagctgaccattcctttggatggagcaggtttgagacacactttttgtagaatctacaagtggatatttggacctctctgaggatttcgttggaaacgggataactgcacctaactaaacggaagcattctcagaaactgctttgtgatgattgcattcacctcacagagttgaacattcctattgatagagcagtttggaaacactcttgttgtggaatgtgcaagtggagatttggagcgctttgaggcctatggtagtaaagggaatagcttcatagaaaaactagacagatgcattctcaggaactttttggtgatgtttgtattcaactcccagagttgaactttcctttggaaagagcagctatgaaacactctttttctagaatctgcaagtggacgtttggagggctttgtggtttgtggtggaaaaggaaatatcttcacctaaatactagatagaagcattctcagaagcttctctgtgatgactgcattcaactcacggagttgaacactccttttgagagcgcagttttgaaactctctttctgtggcatctgcaaggggacatgtagacctctttgaagatttcgttggaaacggaatcatcttcacataaaaactatacagaagcagtctcagaatcttctttgtgatgtttgcattcaaatcccagagttgaactttcctttcaaagttcacgtttgaaacactctttttgcaggatctacaagtggatatttggaccactctgtgtccttcgttcgaaacgggtatatcttcacacgacatctagacagaagctttctcagaaaattctttgggatgattgagttgaactcacagagctgaacattccttgcgatgtagcagtttagaaacacactttctgcagaatctgcaagtgcatatttggacctctctgaggaattcgttggaaacaggataatttcagctgactaaacagaagcattctcagaaccttcttcgtgatgtctgcattcaactcacagtgtggaacctttctttgatagttcaggtttgaaacactctttttgtagaaactgcaaggggataattgcacttctttgaggcctaccgtagtaaaggaaataacttcctatagaaagaagacagaagcattctcagaaccctcttcgtgatgtttgcattcaactcacagtgctgaacctttctttgatagttcagctttgaaacactcttcttgtagaaactgcaagtggatatttggtcctctctgaggatttcgttggaaacgggataaaccgcacagaactaaacagaagaattctcagagccctcttcgtgatgtttgcattcaactcacagtgctgaacctttctttgatagtgcagctttgaaacactctttttgtagaaactgcaagtggatgtttggtcctctctgaggatttcgttggaaacgggataaaccgcacagaactaaaacagaagcattgtcagaaacttctttgtgatgattgcattcaactcacagagttgaaggttccttttcaaacagcagtttccaatcactctttctgtggaatctgcaagtggatatttgggcctctctgaggatttcgttggaaacgggataaaacgcacagaactaaaacagaagcattctcagaaacttctctgtgatgtttgtgttcaactcccagagtttcacgttgcttttcatagagtagttctgaaacatgcttttcgtagtgtctgcaagtggacatttggagcgctttcaggcctgtggtggaaaacgaattatggtcacataaaaactggagagaagccttctcagaaacttctctgtgatgattgcattcaactcacagagttgaaccctcctatggatagagcagtgttgaaactctctttttgtggaatctgcaagtggatatgtggacctctccgaagatgtctttggaaacgggaatatcttcacataaaaactaaacagaagcattctcagaaacttcttggtgatgtttgcattcaaatcccagagttgaaccttcctttgatagttcaggtttgaaacactctttctgtaggatctgcaagtggctatttggaccactctgtggccttcgttcgaaacgggtatatcttcgcataaaatctagacagaagcattctcagaaaatactttgtgatgattgagtttaaatcacagagctgaccattcctttggatggagcaggtttgagacacactttttgtagaatctacaagtggatatttggacctctctgaggatttcgttggaaacgggataactgcacctaactaaacggaagcattctcagaaactgctttgtgatgattgcattcacctcacagagttgaacattcctattgatagagcagtttggaaacactcttgttgtggaatgtgcaagtggagatttggagcgctttgaggcctatggtagtaaagggaatagcttcatagaaaaactagacagatgcattctcaggaactttttggtgatgtttgtattcaactcccagagttgaactttcctttggaaagagcagctatgaaacactctttttctagaatctgcaagtggacgtttggagggctttgtggtttgtggtggaaaaggaaatatcttcacctaaatactagatagaagcattctcagaagcttctctgtgatgactgcattcaactcacggagttgaacactccttttgagagcgtagttttgaaactctctttctgtggcatctgcaaggggacatgtagacctctttgaagatttcgttggaaacggaatcatcttcacataaaaactatacagaagcagtctcagaatcttctttgtgatgtttgcattcaaatcccagagttgaactttcctttcaaagttcacgtttgaaacactctttttgcaggatctacaagtggatatttggaccactctgtgtccttcgttcgaaacgggtatatcttcacaggacatctagacagaagctttctcagaaaattctttgggatgattgagtggaactcacagagctgaacattccttgtgatgtagcagtttagaaacacactttctgcagaatctgcaagtgcatatttggacctctctgaggaattcgttggaaacgggataatttcagctgactaaacagaagcattctcagaaccttcttcgtgatgtctgcattcaactcacagtgtggaacctttctttgatagttcaggtttgaaacactctttttgtagaaactgcaaggggataattgcacttctttgaggcctaccgtagtaaaggaaataacttcctatagaaagaagacagaagcattctcagaaccctcttcgtgatgtttgcattcaactcacagtgctgaacctttctttgatagttcagctttgaaacactcttcttgtagaaactgcaagtggatatttggtcctctctgaggatttcgttggaaacgggataaaccgcacagaactaaacagaagaattctcagagccctcttcgtgatgtttgcattcaactcacagtgctgaacttttctttgatagtgcagctttgaaacactctttttgtagaaactgcaagtggatgtttggtcctctctgaggatttcgttggaaacgggataaaccgcacagaactaaaacagaagcattctcagaaccttcttcgtgatgtttgcattcaactcaacagtgttgaacctttctttgatagttcaggtttgaaacggtctttctgtagaaactgcaagtagatatttggaccgctctgaggatttcgttggaaacgggataacccgcacagaactaaaacagaagcattcagaaaaaactcttggtgacgactgagtttaactcacagagctgaacattcctttggagggagcagtttcgaaacacactatttgtagaatgtgcaagtggatatttgggcctctctgaggatttcgttggaaacgggataaaccgcacagaactaaacagaagcattctcagaaactactttgtgatgattgcattcaagtcacagagttgaacattccctttgacagagcagtttggaaactctctttgtgtagaatctgcaagtggagatatggaccgctttgaggcctatggtagtaaaggaaatagcttcatataaaagctagacagtagcattctcagaaacttctttctgatgcttgcattcaactcacagagttgaactttccttttgagagagaagctttgaaacactctttttccagaatctgcaagtggacatttggagggctttgaggcctgtggtggaaaaggaattatcttcccgtaaaagctagatagaagcattgtcagaaacttctttgtgatgattgcattcaactcacagagttgaaggttccttttcaaagagcagtttccaatcactctttctgtggaatctgcaagtggatatttggacctctttgaagatttcgttggaaacgggagaatcttcacagaaaagctaaacagaagcattctcagaaacttctctgtgatgtttgtgttcaactcccagagtttcacattgcttttcatagagtagttctgaaacatgcttttcgtagtgtctgcaagtggacatttggagcgctttcaggcctgtggtggaaaacgatttatggtcacataaaaactggagagaagccttctcagaaacttctctgtgatgattgcattcaactcacagagttgaaccctcctatggatagagcagtgttgaaactctctttttgtggaatctgcaagtggatatgtggacctctccgaagatgtctttggaaacgggaatatcttcacataaaaactaaacagaagcattctcagaaacttcttggtgatgtttgcattcaaatcccagagttgaaccttcctttgatagttcaggtttgaaacactctttctgtaggatctgcaagtggctatttggaccactctgtggccttcgttcgaaacgggtatatcttcgcataaaatctagacagaagcattctcagaaaatactttgtgatgattgagtttaaatcacagagctgaccattcctttggatggagcaggtttgagacacactttttgtagaatctacaagtggatatttggacctctctgaggatttcgttggaaacgggataactgcacctaactaaacggaagcattctcagaaactgctttgtgatgattgcattcacctcacagagttgaacattcctattgatagagcagtttggaaacactcttgttgtggaatgtgcaagtggagatttggagcgctttgaggcctgtggtagtaaagggaatagcttcatagaaaaactagacagatgcattctcaggaactttttggtgatgtttgtattcaactcccagagttgaactttcctttggaaagagcagctatgaaacactctttttctagaatctgcaagtggacgtttggagggctttgtggtttgtggtggaaaaggaaatatcttcacctaaatactagatagaagcattctcagaagcttctctgtgatgactgcattcaactcacggagttgaacactccttttgagagcgcagttttgaaactctctttctgtggcatctgcaaggggacatgtagacctctttgaagatttcgttggaaacggaatcatcttcacataaaaactatacagaagcagtctcagaatcttctttgtgatgtttgcattcaaatcccagagttgaactttcctttcaaagttcacgtttgaaacactctttttgcaggatctacaagtggatatttggaccactctgtgtccttcgttcgaaacgggtatatcttcacacgacatctagacagaagctttctcagaaaattctttgggatgattgagtggaactcacagagctgaacattccttgcgatgtagcagtttagaaacacactttctgcagaatctgcaagtgcatatttggacctctctgaggaattcgttggaaacgggataatttcagctgactaaacagaagcattctcagaaccttcttcgtgatgtctgcattcaactcacagtgtggaacctttctttgatatttcaggtttgaaacactctttttgtagaaactgcaaggggataattgcacttctttgaggcctaccgtagtaaaggaaataacttcctatagaaagaagacagaagcattctcagaaccctcttcgtgatgtttgcattcaactcacagtgctgaacctttctttgatagttcagctttgaaacactcttcttgtggaaactgcaagtggatatttggtcctctctgaggatttcgttggaaacgggataaaccgcacagaactaaacagaagaattctcagagccctcttcgtgatgtttgcattcaactcacagtgctgaacctttctttgatagtgcagctttgaaacactctttttgtagaaactgcaagtggatgtttggtcctctctgaggatttcgttggaaacgggataaaccgcacagaactaaaacagaagcattgtcagaaacttctttgtgatgattgcattcaactcacagagttgaaggttccttttcaaacagcagtttccaatcactctttctgtggaatctgcaagtggatatttgggcctctctgaggatttcgttggaaacgggataaaacgcacagaactaaaacagaagcattctcagaaacttctctgtgatgtttgtgttcaactcccagagtttcacgttgcttttcatagagtagttctgaaacatgcttttcgtagtgtctgcaagtggacatttggagcgctttcaggcctgtggtggaaaacgaattatggtcacataaaaactggagagaagccttctcagaaacttctctgtgatgattgcattcaactcacagagttgaaccctcctatggatagagcagtgttgaaactctctttttgtggaacctgcaagtggatatgtggacctctccgaagatgtctttggaaacgggaatatcttcacataaaaactaaacagaagcattctcagaaacttcttggtgatgtttgcattcaaatcccagagttgaaccttcctttgatagttcaggtttgaaacactctttctgtaggatctgcaagtggctatttggaccactctgtggccttcgttcgaaacgggtatatcttcgcataaaatctagacagaagcattctcagaaaatactttgtgatgattgagtttaaatcacagagctgaccattcctttggatggagcaggtttgagacacactttttgtagaatctacaagtggatatttggacctctctgaggatttcgttggaaacgggataactgcacctaactaaacggaagcattctcagaaactgctttgtgatgattgcattcacctcacagagttgaacattcctattgatagagcagtttggaaacactcttgttgtggaatgtgcaagtggagatttggagcgctttgaggcctatggtagtaaagggaatagcttcatagaaaaactagacagatgcattctcaggaactttttggtgatgtttgtattcaactcccagagttgaactttcctttggaaagagcagctatgaaacactctttttctagaatctgcaagtggacgtttggagggctttgtggtttgtggtggaaaaggaaatatcttcacctaaatactagatagaagcattctcagaagcttctctgtgatgactgcattcaactcacggagttgaacactccttttgagagcgcagttttgaaactctgtttctgtggcttctgcaaggggacatgtagacctctttgaagatttcgttggaaacggaatcatcttcacatcaaaactatacagaagcagtctcagaatcttctttgtgatgtttgcattcaaatcccagagttgaactttcctttccaagttcacgtttgaaacactctttttgcaggatctacaagtggatatttggaccactctgtgtccttcgttcgaaacgggtatatcttcacatgacatctagacagaagctttctcagaaaattctttgggatgattgagttgaactcacagagctgagcattccttgcgatgtagcagtttagaaacacactttctgcagaatctgcaagtgcatatttggacctctgtgaggaattcgttggaaacgggataatttcagctgactacacagaagcattctcagaaccttcttcgtgatgtctgcattcaacacaaagtgtggaacctttctttgatagttcaggttttaaaaactctttttgtagaaactgcaaggggataattgcactctttgaggagtaccgtagtaaaggaaataacttcctataaaaagaagacagaagaattctcagagccctcttcgtgatgtttgcattcaactcacagtgctgaacctttctttgatagtgcagctttgaaacactctttttgtagaaactgcaagtggatgtttggtcctctctgaggatttcgttggaaacgggataaaccgcacagaactaaaacagaagcattcacagaaaactcttggtgacgactgagtttaactcacagagctgaacattcctttggatggagcagtttcgaaacacactatttgtagaatctgcaagtggatatttgggcctctctgaggatttcgttggaaaccggattaaaacgcacagaactaaaacagaagcattctcagaaactactttgtgatgattgcattcaagtcacagagttgaacattccctttgacagagcagtttggaaactctctttgtgtagaatctgcaagtggagatatggaccgctttgaggcctatggtagtaaaggaaatagcttcatataaaagctagacagtagcattctcagaaacttctttgtgatgcttgcattcaactcacagagttgaactttcctttcgagagagaagctttgaaacactctttttccagaatctgcaagtggacatttggagggctttgaggcctgtggtggaaaaggaattaacttcccgtaaaagctagatagaagcattgtcagaaacttctttgtgatgattgcattcaactcacagagatgaaggttcctttacaaacagcagtttccaaacactctttctgtggaatctgcaagtggatatttggacctcattgaagatttcattggaaacgggagaatcttcacagaaaagctaaacagaagcattctcagaaacttctctgtgatgtttgtgttcaactcccagagtttcacattgcttttcatagagtagttctgaaacatgcttttcgtagtgtctgcaagtggacatttggagcgctttcaggcctgtggtggaaaacgaattatggtcccataaaaactggagagaagccttctcagaaacttctctgtgatgattgcattcaactcacaggtttgaaccctcctatggatagagcattgttgaaactctctttttgtggaatctgcaagtggatatgtggacctctccgaagatgtctttggaaacgggaatatcttcacataaaaactaaacagaagcattctcagaaacttcttggtgatgtttgcattcaaatcccagagttgaaacttcctgtgatagttcaggtttgaaacacactttttgtaggatctgcaagtggatatttggaccactctgtggccttcgttcgaaacgggtacatcttcgcataaaatctagacagaagcattctcagaaaatactttgtgatgattgagtttaactcacagagctgaacattcctttggatggagcaggtttgagtcacactttttgtagaatctacaagtggatatttggacctctctgaggatttcgttggaaacgcgataactgcacctaactaaacggaagcattctcagaaactactttgtgatgattgcattcacctcaccgagttgaacattcctattgatagagcagtttggaaacactcttgttgtggaatgtgcaagtggagatttggagcgctttgaggcctatggtaataaagggaatagcttcatagaaaaactagacagatgcattctcaggaactttttggtgatgtttgtattcaactcccagagttgaactttcctttggaaagagcagctatgaaacactctttttctagaatctgcaagtggacgtttggagggctttgtggtttgtggtggaaaaggaaatatcttcaactaaatactagatagaagcattctcagaagcttctctgtgatgactgcattcaactcacggagttgaacactcctcttgagagcgcagttttgaaactctctttctgtggcatccgcaaggggacatgtagacctctttgaagatttcgttggaaacggaatcatcttcacataaaatctatacagaagcagtctcagaatcttctttgtgatgtttgcattcaaatccccgagttgaactttcctttcaaagttcacgtttgaaacactctttttgcaggatctacaagtggatatttggaccactctgtgtccttcgttcgaaacgggtatatcttcacatgacatctagacagaagctttctcaaaaaattctttgggatgattgagttgaactcacagagctgagcattccttgcgatgtagcagtttagaaacacactttctgcagaatctgcaagtgcatatttggaactctgtgaggaattcgttggaaacgggataatttcagctgactaaacagaagcattctcagaaccttcttcgtgatgtctgcattcaactcacagtgtggaacctttctttgatagttcaggtttgaaacactctttctgtagaaactgcaaggggataattgcactctttgaggagtaccgtagtaaaggaaataacttcctataaaaagaagacagaagcattctcagaaccctcttcgtgatgtttgcattcaactcacagtgctgaacctttctttgatagttcagctttgaaacactctttttgtagaaactgcaagtggatatttggtcctctctgagcatttcgttggaaacgggataaactgcacagaactaaacagaagcattctcagaaccttcttcgtgatgtttgcattcaactcacagtgttgaacctttctttgatagttcaggtttgaaacggtctttctgtagaaactgcaagtagatatttggacctctctgaggatttcgttggaaacgggataacccgcacagaactaaaacagaagcattcacagaaaactcttggtgacgactgagtttaactcacagagctgaacattcctttggatggagcagtttcgaaacacactatttgtagaatgtgcaagtggatatttaggcctctctgaggatttcgttggaaacgggataaaccgcacagaactaaacagaagcattctcagtaaactactttgtgatgattgcattcaagtcacagagttgaacattccctttgacagagcagtttggaaactctctttgtgtagaatctgcaagtggagatatggaccgctttgaggcctatggtagtaaaggaaatagcttcatataaaagctagacagtagcattctcagaaacttctttgtgatgcttgcattcaactcacagagttgaacttccctttcgagagagaagctttgaaacactctttttccagaatgtgcaagtggacatttggagggctttgaggcctgtggtggaaaaggagttatcttcccgtaaaagctagatagaagcattgtcagaaacttctttgtgatgattgcattcaactcacagagttgaaggttccttttcaaacagcagtttccaatcactctttctgtggaatctgcaagtggatatttcgacctctttgaagatttcgttggaaacgggagaatcttcacagaaaagctaaacagaagcattctcagaaacttctctgtgatgtttgtgttcaactcccagagtttcacgttgcttttcatagagtagttctgaaacatgcttttcgtagtgtctgcaagtggacatttggagcgctttcaggcctgtggtggaaaacgaattatggtcacatgaaaactggagagaagccttctcagaaacttctctgtgatgattgcattcaactcacagagttgaaccctcctatggatagagcagtgttgaaactctctttttgtggaatctgcaagtggatatgtggacctctccgaagatgtctttggaaacgggaatatcttcacataaaaactaaacagaagcattctcagaaacttcttggtgatgtttgcattcaaatcccagagttgaaccttcctttgatagttcaggtttgaaacactctttctgtaggatctgcaagtggctatttggaccactctgtggccttcgttcgaaacgggtatatcttcgcataaaatctagacagaagcattctcagaaaatactttgtgatgattgagtttaaatcacagagctgaccattcctttggatggagcaggtttgagacacactttttgtagaatctacaagtggatatttggacctctctgaggatttcgttggaaacgggataactgcacctaactaaacggaagcattctcagaaactgctttgtgatgattgcattcacctcacagagttgaacattcctattgatagagcagtttggaaacactcttgttgtggaatgtgcaagtggagatttggagcgctttgaggcctatggtagtaaagggaatagcttcatagaaaaactagacagatgcattctcaggaaccttttggtgatgtttgtattcaactcccagagttgaactttcctttggaaagagcagctatgaaacactctttttctagaatctgcaagtggacgtttggagggctttgtggtttgtggtggaaaaggaaatatcttcacctaaatactagatagaagcattctcagaagcttctctgtgatgactgcattcaactcacggagttgaacactccttttgagagcgcagttttgaaactctctttctgtggcatctgcaaggggacatgtagacctctttgaagatttcgttggaaacggaatcatcttcacataaaaactatacagaagcagtctcagaatcttctttgtgatgtttgcattcaaatcccagagttgaactttcctttcaaagttcacgtttgaaacactctttttgcaggatctacaagtggatatttggaccactctgtgtccttcgttcgaaacgggtatatcttcacacgacatctagacagaagctttctcagaaaattctttgggatgattgagtggaactcacagagctgaacattccttgcgatgtagcagtttagaaacacactttctgcagaatctgcaagtgcatatttggacctctctgaggaattcgttggaaacgggataatttcagctgactaaacagaagcattctcagaaccttcttcgtgatgtctgcattcaactcacagtgtggaacctttctttgatagttcaggtttgaaacactctttttgtagaaactgcaaggggataattgcacttctttgaggcctaccgtagtaaaggaaataacttcctatagaaagaagacagaagcattctcagaaccctcttcgtgatgtttgcattcaactcacagtgctgaacctttctttgatagttcagctttgaaacactcttcttgtagaaactgcaagtggatatttggtcctctctgaggatttcgttggaaacgggataaaccgcacagaactaaacagaagaattctcagagccctcttcgtgatgtttgcattcaactcacagtgctgaacctttctttgatagtgcagctttgaaacactctttttgtagaaactgcaagtggatgtttggtcctctctgaggatttcgttggaaacgggataaaccgcacagaactaaaacagaagcattgtcagaaacttctttgtgatgattgcattcaactcacagagttgaaggttccttttcaaacagcagtttccaatcactctttctgtggaatctgcaagtggatatttgggcctctctgaggatttcgttggaaacgggataaaacgcacagaactaaaacagaagcattctcagaaacttctctgtgatgtttgtgttcaactcccagagtttcacgttgcttttcatagagtagttctgaaacatgcttttcgtagtgtctgcaagtggacatttggagcgctttcaggcctgtggtggaaaacgaattatggtcacataaaaactggagagaagccttctcagaaacttctctgtgatgattgcattcaactcacagagttgaaccctcctatggatagagcagtgttgaaactctctttttgtggaatctgcaagtggatatgtggacctctccgaagatgtctttggaaacgggaatatcttcacataaaaactaaacagaagcattctcagaaacttcttggtgatgtttgcattcaaatcccagagttgaaccttcctttgatagttcaggtttgaaacactctttctgtaggatctgcaagtggctatttggaccactctgtggccttcgttcgaaacgggtatatcttcgcataaaatctagacagaagcattctcagaaaatactttgtgatgattgagtttaactcacagcagctgaacattcctttggatggagcaggtttgagacacactttttgtagaatctacaagtggatatttggacctctctgaggatttcgttggaaacgggataactgcacctaactaaacggaaacattctcagaaactgctttgtgatgattgcattcacctcacagagttgaacattcctattgatagagcagtttggaaacactcttgttgtggaatgtgcaagtggagatttggagtgctttgaggcctatggtagtaaagggaatagcttcatagaaaaactagacagatgcattctcaggaactttttggtgatgtttgtattcaactcccagagttgaactttcctttggaaagagcagctatgaaacactctttttctagaatctgcaagtggacgtttggagggctttgtggtttgtggtggaaaaggaaatatcttcacctaaatactaggatagaagcattctcagaagcttctctgtgatgactgcattcaactcacggagttgaacactccttttgagagcgcagttttgaaactctctttctgtggcatctgcaaggggacatgtagacctctttgaagatttcgttggaaacggaatcatcttcacataaaaactatacagaagcagtctcagaatcttctttgtgatgtttgcattcaaatcccagagttgaactttcctttcaaagttcacgtttgaaacactctttttgcaggatctacaagtggatatttggaccactctgtgtccttcgttcgaaacgggtatatcttcacatgacatctagacggaagctttctcagaaaattctttgggatgattgagttgaactcacagagctgaacattccttgcgatggagcagttagaaacacactttctgcagaatctacaagtgcatatttggatctctctgaggaattcgttggaaacgggataatttcagctgactaaacagaagcattctcagaaccttcttcgtgatgtctgcattcaactcacagtgtggaacctttctttgatagttcaggtttgaaacactctttttgtggaaactgcaaggggataattgcacttctttgaggcctaccgtagtaatggaaataacttcctataaaaagaagacagaagcattctcagaaccctcttcgtgatgtttgcattcaactcacagtgctgaacctttctttgatagttcagctttgaaacactcttcttgtagaaactgcaagtggatatttggtcctctctgaggatttcgttggaaacgggataaaccgcacagaactaaacagaagaattctcagagccctcttcgtgatgtttgcattcaactcacagtgctgaacctttctttgatagtgcagctttgaaacactctttttgtagaaactgcaagtggatgtttggtcctctctgaggatttcgttggaaacgggataaaccgcacagaactaaaacagaagcattgtcagaaacttctttgtgatgattgcattcaactcacagagttgaaggttccttttcaaacagcagtttccaatcactctttctgtggaatctgcaagtggatatttgggcctctctgaggatttcgttggaaacgggataaaacgcacagaactaaaacagaagcattctcagaaacttctctgtgatgtttgtgttcaactcccagagtttcacgttgcttttcatagagtagttctgaaacatgcttttcgtagtgtctgcaagtggacatttggagcgctttcaggcctgtggtggaaaacgaattatggtcacataaaaactggagagaagccttctcagaaacttctctgtgatgattgcattcaactcacagagttgaaccctcctatggatagagcagtgttgaaactctctttttgtggaatctgcaagtggatatgtggacctctccgaagatgtctttggaaacgggaatatcttcacataaaaactaaacagaagcattctcagaaacttcttggtgatgtttgcattcaaatcccagagttgaaccttcctttgatagttcaggtttgaaacactctttttgtaggatctgcaagtggctatttggaccactctgtggccttcgttcgaaacgggtatatcttcgcataaaatctagacagaagcattctcagaaaatactttgtgatgattgagtttaactcacagagctgaacattcttttggatggagcaggtttgagacacactttttgtagaatctacaagtggatatttggacctctctgaggatttcgttggaaacgggataactgcacctaactaaacggaagcattctcagaaactgctttgtgatgattgcattcacctcacagagttgaacattcctattgatagagcagtttggaaacactcttgttgtggaatgtgcaagtggagatttggagcgctttgaggcctatggtagtaaagggaatagcttcatagaaaaactagacagatgcattctcaggaactttttggtgatgtttgtattcaactcccagagttgaactttcctttggaaagagcagctatgaaacactctttttctagaatctgcaagtggacgtttggagggctttgtggtttgtggtggaaaaggaaatatcttcacctaaatactagatagaagcattctcagaagcttctctgtgatgactgcattcaactcacggagttgaacactccttttgagagcgcagttttgaaactctctttctgtggcatctgcaaggggacatgtagacctctttgaagatttcgttggaaacggaatcatcttcacataaaaactatacagaagcagtctcagaatcttctttgtgatgtttgcattcaaatccccgagttgaactttcctttcaaagttcacgtttgaaacactctttttgcaggatctacaagtggatatttggaccactctgtgtccttcgttcgaaacgggtatatcttcacatgacatctagacagaagctttctcagaaaattctttgggatgattgagttgaactcacagagctgagcattccttgcgatgtagcagtttagaaacacactttctgcagaatctgcaagtgcatatttggacctctgtgaggaattcgttggaaacgggataatttcagctgactaaacagaagcattctcagaaccttcttcgtgatgtctgcattcaactcacagtgtggaacctttctttgatagttcaggtttgaaacactctttctgtagaaactgcaaggggataattgcactctttgaggagtaccgtagtaaaggaaataacttcctataaaaagaagacagaagcattctcagaaccctcttcgtgatgtttgcattcaactcacagtgctgaacctttctttgatagttcagctttgaaacactctttttgtagaaactgcaagtggatatttggtcctctctgaggatttcgttggaaacgggataaactgcacagaactaaacagaagcattctcagaaccttcttcgtgatgtttgcattcaactcacagtgttgaacctttctttgatagttcaggtttgaaacggtctttctgtagaaactgcaagtagatatttggacctctctgaggatttcgttggaaacgggataacccgcacagaactaaaacagaagcattcacagaaaactcttggtgacgactgagtttaactcacagagctgaacattcctttggatggagcagtttcgaaacacactatttgtagaatgtgcaagtggatatttaggcctctctgaggatttcgttggaaacgggataaaccgcacagaactaaacagaagcattctcagaaactactttgtgatgattgcattcaagtcacagtagttgaacattccctttgacagagcagtttggaaactctctttgtgtagaatctgcaagtggagatatggaccgctttgaggcctatggtagtaaaggaaatagcttcatataaaagctagacagtagcattctcagaaacttctttgtgatgcttgcattcaactcacagagttgaactttcctttcgagagagaagctttgaaacactctttttccagaatctgcaagtggacatttggagggctttgaggcctgtggtggaaaaggaattatcttcccgtaaaagctagatagaagcattgtcagaaacttctttgtgatgattgcattcaactcacagagttgaaggttccttttcaaagagcagtttccaatcactctttctgtggaatctgcaagtggatatttggacctattttgaagatttcgttggaaacgggagaatcttcacaggaaagctaaacagaagcattctcagaaacttctctgtgatgtttgtgttcaactcccagagtttcacattgcttttcatagagtagttctgaaacatgcttttcgtagtgtctacaagtggacatttggagcgctttcaggcctgtggtggaaaacgaattatggtcacataaaaactggagagaagccttctcagaaacttctctgtgatgattgcattcaactcacagagttgaaccctcctatggatagagcagtgttgaaactctctttttgtggaatctgcaagtggatatgtggacctctccgaagatgtctttggaaacgggaatatcttcacataaaaactaaacagaagcattctcagtaaacttcttggtgatgtttgcattcaaatcccagagttgaaccttcctttgatagttcaggtttgaaacactctttttgtaggatctgcaagtggatatttggaccactctgtggccttcgttcgaaacgggtatatcttcgcataaaatctagacagaagcattctcagaaaatactttgtgatgattgagtttaactcacagagctgaacattcctttggatggagcaggcttgagacacactttttgtagaatccacaagtggatatttggacctctctgaggatttcgttggaaacgggataactgcaccgaactaaacggaagcattctcagaaactgctttgtgatgattgcattcacctcacagagttgaccattcctattgatagagcagtttggaaacactcttgttgtggaatgtgcaagtggagatttggagtgctttgaggcctatggtagtaaagggaatagcttcatagaaaaactagacagatgcattctcaggaactttttggtgatgtttgtattcaactcccagagttgaactttcctttggaaagagcagctatgaaacactctttttctagaatctgcaagtggacgtttggagggctttgtggtttgtggtggaaaaggaaatatcttcacctaaatactagatagaagcattctcagaagcttctctgtgatgactgcattcaactcacggagttgaacactccttttgagagcgcagttttgaaaatctctttctgtggcatctgcaaggggacatgtagacctctttgaagatttcgttggaaacggaatcatcttcacataaaaactatacagaagcagtctcagaatcttctttgtgatgtttgcattcaaatcccagagttgaactttcctttcaaagttcacgtttgaaacactctttttgcaggatctacaagtggatatttggaccactctgtgtccttcgttcgaaacgggtatatcttcacatgacatctagacagaagctttctcagaaaattctttgggatgattgagttgaactcacagtgctgaacattcctagcgatgtagcagtttagaaacacactttctgcagaatctgcaagtgcatatttggacctctgtgaggaattcgttggaaacgggataatttcagctgactaaacagaagcgttctcagaaccttcttcgtgatgtctgcattcaactcacagtgtggaacctttctttgatagctcaggtttgaaacactctttttgtagaaactgcaaggggataattgcacttctttgaggcctaccgtagtaaaggaaataacttcctataaaaagaagacagaagcattctcagaaccctcttcgtgatgtttgcattcaactcacactgctgaaactttctttgatagttcagctttgaaacactctttttgtagaaactgcaagtggatatttggtcctctctgaggatttcgttggaaacgggataaaccgcacagaactaaacagaagcattcacagaaaactcttggtgacgactgagtttaactcacagagctgaacattcctttggatggagcagttttgaaacacactatttgtagattctgcaagtggatatttgggcctctctgaggatttcactggaaacgggataaaccgcacagaactaaaacagaagcattctcagaaactactttgtgatgattgcattcaagtcacagagctgaacattccctttgacagagcagtttggaaactctctttgtgtagaatctgcaagtggagatatgaaatgctttggggactatggtagtaaaggaaatagcttcatataaaagctagacagtagcattctcagaaacttctttgtgatgcttgcattcaactcacagagttgaactttcatttcgagagagaatcttcgaaacactctttttccagaatctgcaagtggacatttggagggctttgaggcctgtggtggaaaaggaattatcatcccgtaaaagctagatagaagcattgtcagaaacttctttgtgatgattgcattcaactcacagagttgaaggttccttttcaaacagcggtttccaaacactgtttctgtggaatctgcaagtggatgtttggacctctttgaagatttcgttggaaacgggagaatcttcacagaaaagctaaacagaagcattctcagaaacttctctgtgatgtttgtgttcaactcccagagtttcacattgcttctcatagagtagttctgaaacatgcttttcgtagtgtctgcaagtggacatttggagagctttcaggcctgtggtggaaaacgaattatggtcacataaaaactggagagaagccttctcagaaacttctgtgtgatgactgcattcaactcacagagttgaaccctcctatggatagagcagtgttgaaactctctttttgtggaatctgcaagtggatatgtggacctctttgaagatgtctttggaaacgggaatatcttcacataaaaactaaacagaagcattctcagaaacttcttggtgatgtttgcattcaaatcccagagttgaaccttcctttgatagttcaggtttgaaacactctttctgtaggatctgcaagtggctatttggaccactctgtggccttcgttcgaaacgggtatatcttcgcataaaatctagacagaagcattctcagaaaatactttgtgatgattgagtttaaatcacagagctgaccattcctttggatggagcaggtttgagacacactttttgtagaatctacaagtggatatttggacctctctgaggatttcgttggaaacgggataactgcacctaactaaacggaagcattctcagaaactgctttgtgatgattgcattcacctcacagagttgaacattcctattgatagagcagtttggaaacactcttgttgtggaatgtgcaagtggagatttggagcgctttgaggcctgtggtagtaaagggaatagcttcatagaaaaactagacagatgcattctcaggcaactttttggtgatgtttgtattcaactcccagcagttgaactttcctttggaaagagcagctatgaaacaccctttttctagaatctgcaagtggacgtttggagggctttgtggtttgtggtggaaaaggaaatatcttcacctaaatactagatagaagcattctcagaagcttctctgtgatgactgcattcaactcacggagttgaacactccttttgagagcgcagttttgaaactctctttctgtggcatctgcaagggacatgtagacctctttgaagatttcgttggaaacggaatcatcttcacataaaaactatacagaagcagtctcagaatcttctttgtgatgtttgcattcaaatcccagagttgaactttcctttcaaagttcacgtttgaaacactctttttgcaggatctacaagtggatatttggaccactctgtgtccttcgttcgaaacgggtatatcttcacacgacatctagacagaagctttctcagaaaattctttgggatgattgagtggaactcacagagctgaacattccttgcaatgtagcagtttagaaacacactttctgcagaatctgcaagtgcatatttggacctctctgaggaattcgttggaaacgggataatttcagctgactaaacagaagcattctcagaaccttcttcgtgatgtctgcattcaactcacagtgtggaacctttctttgatagttcaggtttgaaacactctttttgtagaaactgcaaggggataattgcacttctttgaggcctaccgtagtaaaggaaataacttcctatagaaagaagacagaagcattctcagaaccctcttcgtgatgtttgcattcaactcacagtgctgaacctttctttgatagttcagctttgaaacactcttcttgtagaaactgcaagtggatatttggtcctctctgaggatttcgttggaaacgggataaaccgcacagaactaaacagaagaattctcagagccctcttcgtgatgtttgcattcaactcacagtgctgaacctttctttgatagtgcagctttgaaacactctttttgtagaaactgcaagtggatgtttggtcctctctgaggatttcgttggaaacgggataaaccgcacagaactaaaacagaagcattgtcagaaacttctttgtgatgattgcattcaactcacagagttgaaggttccttttcaaacagcagtttccaatcactctttctgtggaatctgcaagtggatatttgggcctctctgaggatttcgttggaaacgggataaaacgcacagaactaaaacagaagcattctcagaaacttctctgtgatgtttgtgttcaactcccagagtttcacgttgcttttcatagagtagttctgaaacatgcttttcgtagtgtctgcaagtggacatttggagcgctttcaggcctgtggtggaaaacgaattatggtcacataaaaactggagagaagccttctcagaaacttctctgtgatgattgcattcaactcacagagttgaaccctcctatggatagagcagtgttgaaactctctttttgtggaatctgcaagtggatatgtggacctctccgaagatgtctttggaaacgggaatatcttcacataaaaactaaacagaagcattctcagaaacttcttggtgatgtttgcattcaaatcccagagttgaaccttcctttgatagttcaggtttgaaacactctttttgtaggatctgcaagtggctatttggaccactctgtggccttcgttcgaaacgggtatatcttcgcataaaatctagacagaagcattctcagaaaatactttgtgatgattgagtttaaatcacagagctgaccattcctttggatggagcaggtttgagacacactttttgtagaatctacaagtggatatttggacctctctgaggatttcgttggaaacgggataactgcacctaactaaacggaagcattctcagaaactgctttgtgatgattgcattcacctcacagagttgaacattcctattgatagagcagtttggaaacactcttgttgtggaatgtgcaagtggagatttggagcgctttgaggtctatggtagtaaagggaatagcttcatagaaaaactagacagatgcattctcaggaactttttggtgatgtttgtattcaactcccagagttgaactttcctttggaaagagcagctatgaaacactctttttctagaatctgcaagtggacgtttggagggctttgtggtttgtggtggaaaaggaaatatcttcacctaaatactagatagaagcattctcagaagcttctctgtgatgactgcattcaactcacggagttgaacactccttttgagagcgcagttttgaaactctctttctgtggcatctgcaaggggacatgtagacctctttgaagatttcgttggaaacggaatcatcttcacataaaaactatacagaagcagtctcagaatcttctttgtgatgtttgcattcaaatcccagagttgaactttcctttcaaagttcacgtttgaaacactctttttgcaggatctacaaagtggatatttggaccactctgtgtccttcgttcgaaacgggtatatcttcacacgacatctagacagaagctttctcagaaaattctttgggatgattgagtggaactcacagagctgaacattccttgcgatgtagcagtttagaaacacactttctgcagaatctgcaagtgcatatttggacctctctgaggaattcgttggaaacgggataatttcagctgactaaacagaagcattctcagaaccttcttcgtgatgtctgcattcaactcacagtgtggaacctttctttgatagttcaggtttgaaacactctttttgtagaaactgcaaggggataattgcacttctttgaggcctaccgtagtaaaggaaataacttcctatagaaagaagacagaagcattctcagaaccctcttcgtgatgtttgcattcaactcacagtgctgaacctttctttgatagttcagctttgaaacactcttcttgtagaaactgcaagtggatatttggtcctctctgaggatttcgttggaaacgggataaaccgcacagaactaaacagaagcattctcagagacctcttcgtgatgtttgcattcaactcacagtgctgaacctttctttgatagtgcagctttgaaacactctttttgtagaaactgcaagtggatgtttggtcctctctgaggatttcgttggaaacgggataaaccgcacagaactaaaacagaagcattgtcagaaacttctttgtgatgattgcattcaactcacagagttgaaggttccttttcaaacagcagtttccaatcactctttctgtggaatctgcaagtggatatttgggcctctctgaggatttcgttggaaacgggataaaacgcacagaactaaaacagaagcattctcagaaacttctctgtgatgtttgtgttcaactcccagagtttcacgttgcttttcatagagtagttctgaaacatgcttttcgtagtgtctgcaagtggacatttggagcgctttcaggcctgtggtggaaaacgaattatggtcacataaaaactggagagaagccttctcagaaacttctctgtgatgattgcattcaactcacagagttgaaccctcctatggatagagcagtgttgaaactctctttttgtggaatctgcaagtggatatgtggacctctccgaagatgtctttggaaacgggaatatcttcacataaaaactaaacagaagcattctcagaaacttcttggtgatgtttgcattcaaatcccagagttgaaccttcctttgatagttcaggtttgaaacactctttctgtaggatctgcaagtggctatttggaccactctgtggccttcgttcgaaacgggtatatcttcgcataaaatctagacagaagcattctcagaaaatactttgtgatgattgagtttaaatcacagagctgaccattcctttggatggagcaggtttgagacacactttttgtagaatctacaagtggatatttggacctctctgaggatttcgttggaaacgggataactgcacctaactaaacggaagcattctcagaaactgctttgtgatgattgcattcacctcacagagttgaacattcctattgatagagcagtttggaaacactcttgttgtggaatgtgcaagtggagatttggagcgctttgaggcctgtggtagtaaagggaatagcttcatagaaaaactagacagatgcattctcaggaaccttttggtgatgtttgtattcaactcccagagttgaactttcctttggaaagagcagctatgaaacactctttttctagaatctgcaagtggacgtttggagggctttgtggtttgtggtggaaaaggaaatatcttcacctaaatactagatagaagcattctcagaagcttctctgtgatgactgcattcaactcacggagttgaacactccttttgagagcgcagttttgaaactctctttctgtggcatctgcaaggggacatgtagacctctttgaagatttcgttggaaacggaatcatcttcacataaaaactatacagaagcagtctcagaatcttctttgtgatgtttgcattcaaatcccagagttgaactttcctttcaaagttcacgtttgaaacactctttttgcaggatctacaagtggatatttggaccactctgtgtccttcgttcgaaacgggtatatcttcacacgacatctagacagaagctttctcagaaaattctttgggatgattgagtggaactcacagagctgaacattccttgcgatgtagcagtttagaaacacactttctgcagaatctgcaagtgcatatttggacctctctgaggaattcgttggaaacgggataatttcagctgactaaacagaagcattctcagaaccttcttcgtgatgtctgcattcaactcacagtgtggaacctttctttgatagttcaggtttgaaacactctttttgtagaaactgcaaggggataattgcacttctttgaggcctaccgtagtaaaggaaataacttcctatagaaagaagacagaagcattctcagaaccctcttcgtgatgtttgcattcaactcacagtgctgaacctttctttgatagttcagctttgaaacactcttcttgtagaaactgcaagtggatatttggtcctctctgaggatttcgttggaaacgggataaaccgcacagaactaaacagaagaattctcagagccctcttcgtgatgtttgcattcaactcacagtgctgaacctttctttgatagtgcagctttgaaacactctttttgtagaaactgcaagtggatgtttggtcctctctgaggatttcgttggaaacgggataaaccgcacagaactaaaacagaagcattgtcagaaacttctttgtgatgattgcattcaactcacagagttgaaggttccttttcaaacagcagtttccaatcactctttctgtggaatctgcaagtggatatttgggcctctctgaggatttcgttggaaacgggataaaacgcacagaactaaaacagaagcattctcagaaacttctctgtgatgtttgtgttcaactcccagagtttcacgttgcttttcatagagtagttctgaaacatgcttttcgtagtgtctgcaagtggacatttggagcgctttcaggcctgtggtggaaaacgaattatggtcacataaaaactggagagaagccttctcagaaacttctctgtgatgattgcattcaactcacagagttgaaccctcctatggatagagcagtgttgaaactctctttttgtggaatctgcaagtggatatgtggacctctccgaagatgtctttggaaacgggaatatcttcacataaaaactaaacagaagcattctcagaaacttcttggtgatgtttgcattcaaatcccagagttgaaccttcctttgatagttcaggtttgaaacactctttctgtaggatctgcaagtggctatttggaccactctgtggccttcgttcgaaacgggtatatcttcgcataaaatctagacagaagcattctcagaaaatactttgtgatgattgagtttaaatcacagagctgaccattcctttggatggagcaggtttgagacacactttttgtagaatctacaagtggatatttggacctctctgaggatttcgttggaaacgggataactgcacctaactaaacggaagcattctcagaaactgctttgtgatgattgcattcacctcacagagttgaacattcctattgatagagcagtttggaaacactcttgttgtggaatgtgcaagtggagatttggagcgctttgaggcctatggtagtaaagggaatagcttcatagaaaaactagacagatgcattctcaggaactttttggtgatgtttgtattcaactcccagagttgaactttcctttggaaagagcagctatgaaacactttttctagaatctgcaagtggacgtttggagggctttgtggtttgtggtggaaaaggaaatatcttcacctaaatactagatagaagcattctcagaagcttctctgtgatgactgcattcaactcacggagttgaacactccttttgagagcgcagttttgaaactctctttctgtggcatctgcaaggggacatgtagacctctttgaagatttcgttggaaacggaatcatcttcacataaaaactatacagaagcagtctcagaatcttctttgtgatgtttgcattcaaatcccagagttgaatttcctttcaaagttcacgtttgaaacactctttttgcaggatctacaagtggatatttggaccactctgtgtccttcgttcgaaacgggtatatcttcacatgacatctagacagaagctttctcagaaaattctttgggatgattgagtggaactcacagagctgaacattccttgcgatgtagcagtttagaaacacactttctgcagaatctgcaagtgcatatttggacctctctgaggaattcgttggaaacgggataatttcagctgactaaacagaagcattctcagaaccttcttcgtgatgtctgcattcaactcacagtgtggaacctttctttgatagttcaggtttgaaacactctttttgtagaaactgcaaggggataattgcacttctttgaggcctaccgtagtaaaggaaataacttcctatagaaagaagacagaagcattctcagaaccctcttcgtgatgtttgcattcaactcacagtgctgaacctttctttgatagttcagctttgaaacactcttcttgtagaaactgcaagtggatatttggtcctctctgaggatttcgttggaaacgggataaaccgcacagaactaaacagaagaattctcagagccctcttcgtgatgtttgcattcaactcacagtgctgaacctttctttgatagtgcagctttgaaacactctttttgtagaaactgcaagtggatgtttggtcctctctgaggatttcgttggaaacgggataaaccgcacagaactaaaacagaagcattgtcagaaacttctttgtgatgattgcattcaactcacagagttgaaggttccttttcaaacagcagtttccaatcactctttctgtggaatctgcaagtggatatttgggcctctctgaggatttcgttggaaacgggataaaacgcacagaactaaaacagaagcattctcagaaacttctctgtgatgtttgtgttcaactcccagagtttcacgttgcttttcatagagtagttctgaaacatgcttttcgtagtgtctgcaagtggacatttggagcgctttcaggcctgtggtggaaaacgaattatggtcacataaaaactggagagaagccttctcaggaaacttctctgtgatgattgcattcaactcacagagttgaaccctcctatggatagagcagtgttgaaactctctttttgtggaatctgcaagtggatatgtggacctctccgaagatgtctttggaaacgggaatatcttcacataaaaactaaacagaagcattctcagaaacttctttgtgatatttgcattcaaatcccagagttgaaacttcctttgataggtcaggtttgaaacactctttctgtacgatctgcaagtggatatttggaccactctgtggccttcgttcgaaacgggtacatcttcacataacatctagacagaagcattctcagaaaatactttgtgatgattgagtttaaatcacagagctgaccattcctttggatggagcaggtttgagacacactttttgtagaatctacaagtggatatttggacctctctgaggatttcgttggaaacgggataactgcacctaactaaacggaagaattctcagaaactgctttgtgatgattgcattcacctcacagagttgaacattcctattgatagagcagtttggaaacactcttgttgtggaatgtgcaagtggagatttggagcgctttgaggcctatggtagtaaagggaatagcttcatagaaaaactagacagatgcattctcaggaactttttggtgatgtttgtattcaactcccagagttgaactttcctttggaaagagcagctatgaaacactctttttctagaatctgcaagtggacgtttggagggctttgtggtttgtggtggaaaaggaaatatcttcacctaaatactagagagaagcattctcagaagcttctctgtgatgactgcattcaactcacggagttgaacactccttttgagagcgcagttttgaaactctctttctgtggcatccgcaaggggacatgtagacctctttgaagatttcgttggaaacggaatcatcttcacataaaaactatacagaagcagtctcagaatcttctttgtgatgtttgcattcaaatcccagagttgaactttcctttcaaagttcacgtttgaaacactctttttgcaggatctacaagtggatatttggaccactctgtgtccttcgttcgaaacgggtatatcttcacatgacatctagacagaagctttctcagaaaattctttgggatgattgagtggaactcacagagctgaacattccttgcgatggagcagtttagaaacacactttctgcagaatctgcaagtgcatatttggacctctctgaggaattcgttggaaacgggataatttcagctgactaaacagaagcattctcagaaccttcttcgtgatgtctgcattcaactcacagtgtggaacctttctttgatagttcaggtttgaaacactctttttgtagaaactgcaaggggataattgcacttctttgaggcctaccgtagtaaaggaaataacttcctatagaaagaagacagaagcattctcagaaccctcttcgtgatgtttgcattcaactcacagtgctgaacctttctttgatagttcagctttgaaacactcttcttgtagaaactgcaagtggatatttggtcctctctgaggatttcgttggaaacgggataaaccgcacagaactaaacagaagaattctcagagccctcttcgtgatgtttgcattcaactcacagtgctgaacctttctttgatagtgcagctttgaaacactctttttgtagaaactgcaagtggatgtttggtcctctctgaggatttcgttggaaacgggataaaccgcacagaactaaaacagaagcattgtcagaaacttctttgtgatgattgcattcaactcacagagttgaaggttccttttcaaacagcagtttccaatcactctttctgtggaatctgcaagtggatatttgggcctctctgaggatttcgttggaaacgggataaaacgcacagaactaaaacagaagcattctcagaaacttctctgtgatgtttgtgttcaactcccagagtttcacgttgcttttcatagagtagttctgaaacatgcttttcctagtgtctgcaagtggacatttggagcgctttcaggcctgtggtggaaaacgaattatggtcacataaaaactggagagaagccttctcagaaacttctctgtgatgattgcattcaactcacagagttgaaccctcctatggatagagcagtgttgaaactctctttttgtggaatctgcaagtggatatgtggacctctccgaagatgtctttggaaacgggaatatcttcacataaaaactaaacagaagcattctcagaaacttcttggtgatgtttgtattcaaatcccagagttgaaccttcctttgatagttcaggtttgaaacactctttttgtaggatctgcaagtggctatttggaccactctgtggccttcgttcgaaacgggtacatcttcgcataaaatctagacagaagcattctcagaaaatactttgtgatgattgagtttaaatcacagagctgaacattcctttggatggagcaggtttgagacacactttttgtagaatctacaagtggatatttggacctctctgaggatttcgttggaaacgggataactgcacctaactaaacggaagcattctcagaaactgctttgtgatgattgcattcacctcacagagttgaacattcctattgatagagcagtttggaaacactcttgttgtggaatgtgcaagtggagatttggagcgctttgaggcctatggtagtaaagggaatagcttcatagaaaaactagacagatgcattctcaggaactttttggtgatgtttgtattcaactcccagagttgaactttcctttggaaagagctgctatgaaacactctttttctagaatctgcaagtggacgtttggagggctttgtggtttgtggtggaaaaggaaatatcttcacctaaatactagatagaagcattctcagaagcttctctgtgatgactgcattcaactcacggagttgaacactccttttgagagcgcagttttgaaactccctttctgtggcatctgcaaggggacatgtagacctctttgaagatttcgttggaaacggaatcatcttcacataaaaactatacagaagcagtctcagaatcttctttgtgttgtttgcattcaaatcccagagttgaactttcctttcaaagttcacgtttgaaacactctttttgcaggatctacaagtggatatttggaccactctgtgtccttcgttcgaaacgggtatatcttcacatgacatctagacagaagctttctcagaaaattctttgggatgattgagtggagcaaacagagctgaacactccttgcgatgtagcagtttagaaacaccctttctgcagaatctgcaagtgcatatgtggacctctctgaggaattcgttggaaacgggataatttcagctgactaaacagaagcattctcagaaccttcttcgtgatgtctgcattcaactcacagtgtggaacctttctttgatagttcaggtttgaaacactctttttgtagaaactgcaaggggatcattgcacttctttgaggcctaccgtagtaaaggaaataacttcctataaaaagaagacagaagcattctcagaaccctcttcgtgatgtttgcattcaattcacggtgctgaaactttctttgatagttcagctttgaaacactctttttgtagaaactgcaagtggatatttggtcctctctgaggatttcgttggaaacgggataaaccgcacagaactatacagaagcattctcagaaccttcttcgtgatgtttgcattcaactcacagtgttgaacctttctttgatagttcaggtttgaaacggtctttctgtagaaactgcaagtagatatttggccctctctgaggatttcgttggaaacgggataaaccgcacagaactaaaacagaagcattcacagaaaactcttggtgacgactgagtttaactcacagagctgaacattcctttggatggagcagtttcgaaacacactatttgtagaatgtgcaagtggatatttaggcctctctgaggatttcgttggaaacgggataaaccgcacagaactaaacagaagcattctcagaaactactttgtgatgattgcattcaagtcacagagttgaacattccctttgacagagcagtttggaaactctctttgtgtagaatctgcaagtggagatatggaccgctttgaggcctatggtagtaaaggaaatagcttcatataaaagttagacagtagcattctcagaaacttctttgtgatgcttgcattcaactcacagagttgaactttcctttcgagagagaagctttgaaacactctttttccagaatctgcaagtggacatttggagggctttgaggcctgtggtggaaaaggaattatcttcccgtaaaagctagatagaagcattgtcagaaacttctttgtgatgattgcattcaactcacagagttgaaggttccttttcaaagagcagtttccaatcactctttctgtggaatctgcaagtggatatttggacctattttgaagatttcgttggaaacgggagaatcttcacaggaaagctaaacagaagcattctcagaaacttctctgtgatgtttgtgttcaactcccagagtttcacattgcttttcatagagtagttctgaaacatgcttttcgtagtgtctacaagtggacatttggagcgctttcaggcctgtggtggaaaacgaattatggtcacataaaaactggagagaagccttctcagaaacttctctgtgatgattgcattcaactcacagagttgaaccctcctatggatagagcagtgttgaaactctctttttgtggaatctgcaagtggatatgtggacctctccgaagatgtctttggaaacgggaatatcttcacataaaaactaaacagaagcattctcagaaacttcttggtgatgtttgcattcaaatcccagagttgaaccttcctttgatagttcaggtttgaaacactctttttgtaggatctgcaagtggatatttggaccactctgtggccttcgttcgaaacgggtatatcttcgcataaaatctagacagaagcattctcagaaaatactttgtgatgattgagtttaaatcacagagctgaccattcctttggatggagcaggtttgagacacactttttgtagaatctacaagtggatatttggacctctctgaggatttcgttggaaacgggataactgcacctaactaaacggaagcattctcagaaactgctttgtgatgattgcattcacctcacagagttgaacattcctattgatagagcagtttggaaacactcttgttgtggaatgtgcaagtggagatttggagcgctttgaggcctatggtagtaaagggaatagcttcatagaaaaactagacaggatgcattctcaggaactttttggtgatgtttgtattcaactcccagagttgaactttcctttggaaagagcagctatgaaacactctttttctagaatctgcaagtggacgtttggagggctttgtggtttgtggtggaaaaggaaatatcttcacctaaatactagatagaagcattctcagaagcttctctgtgatgactgcattcaactcacggagttgaacactccttttgagagcgcagttttgaaactctctttctgtggcatctgcaaggggacatgtagacctctttgaagatttcgttggaaacggaatcatcttcacataaaaactatacagaagcagtctcagaatcttctttgtgatgtttgcattcaaatcccagagttgaactttcctttcaaagttcacgtttgaaacactctttttgcaggatctacaagtggatatttggaccactctgtgtccttcgttcgaaacgggtataacttcacacgacatctagacagaagctttctcagaaaattctttgggatgattgagtggaactcacagaggtgaacattccttgcgatgtagcagtttagaaacacactttctgcagaatctgcaagtgcatatttggacctctctgaggaattcgttggaaacgggataatttcagctgactaaacagaagcattctcagaaccttcttcgtgatgtctgcattcaactcacagtgtggaacctttctttgatagttcaggtttgaaacactctttttgtagaaactgcaaggggataattgcacttctttgaggcctaccgtagtaaaggaaataacttcctatagaaagaagacagaagcattctcagaaccctcttcgtgatgtttgcattcaactcacagtgctgaacctttctttgatagttcagctttgaaacactcttcttgtagaaactgcaagtggatatttggtcctctctgaggatttcgttggaaacgggataaaccgcacagaactaaacagaagaattctcagagccctcttcgtgatgtttgcattcaactcacagtgctgaacctttctttgatagtgcagctttgaaacactctttttgtagaaactgcaagtggatgtttggtcctctctgaggatttcgttggaaacgggataaaccgcacagaactaaaacagaagcattgtcagaaacttctttgtgatgattgcattcaactcacagagttgaaggttccttttcaaacagcagtttccaatcactctttctgtggaatctgcaagtggatatttgggcctctctgaggatttcgttggaaacgggataaaacgcacagaactaaaacagaagcattctcagaaacttctctgtgatgtttgtgttcaactcccagagtttcacgttgcttttcatagagtagttctgaaacatgcttttcgtagtgtctgcaagtggacatttggagcgctttcaggcctgtggtggaaaacgaattatggtcacataaaaactggagagaagccttctcagaaacttctctgtgatgattgcattcaactcacagagttgaaccctcctatggatagagcagtgttgaaactctctttttgtggaatctgcaagtggatatgtggacctctccgaagatgtctttggaaacgggaatatcttcacataaaaactaaacagaagcattctcagaaacttcttggtgatgtttgcattcaaatcccagagttgaaccttcctttgatagttcaggtttgaaacactctttctgtaggatctgcaagtggctatttggaccactctgtggccttcgttcgaaacgggtatatcttcgcataaaatctagacagaagcattctcagaaaatactttgtgatgattgagtttaaatcacagagctgaccattcctttggatggagcaggtttgagacacactttttgtagaatctacaagtggatatttggacctctctgaggatttcgttggaaacgggataactgcacctaactaaacggaagcattctcagaaactgctttgtgatgattgcattcacctcacagagttgaacattcctattgatagagcagtttggaaacactcttgttgcggaatgtgcaagtggagatttggagcgctttgaggcctgtggtagtaaagggaatagcttcatagaaaaactagacagatgcattctcaggaactttttggtgatgtttgtattcaactcccagagttgaactttcctttggaaagagcagctatgaaacactctttttctagaatctgcaagtggacgtttggagggctttgtggtttgtggtggaaaaggaaatatcttcacctaaatactagatagaagcattctcagaagcttctctgtgatgactgcattcaactcacggagttgaacactccttttgagagcgtagttttgaaactctctttctgtggcatctgcaaggggacatgtagacctctttgaagatttcgttggaaacggaatcatcttcacataaaaactatacagaagcagtctcagaatcttctttgtgatgtttgcattcaaatcccagagttgaactttcctttcaaagttcacgtttgaaacactctttttgcaggatctacaagtggatatttggaccactctgtgtccttcgttcgaaacgggtatatcttcacatgacatctagacagaagctttctcagaaaattctttgggatgattgagttgagcaaacagagctgaacactccttgcgatgtagcagtttagaaacacactttctgcagaatctgcaagtgcatatgtggacctctctgaggaattcgttggaaatgggataatttcagctgactaaacagaagcattctcagaaccttcttcgtgatgtctgcattcaactcacagtgtggaacctttctttgatagttcaggtttgaaacactctttttgtagaaactgcaaggggatcattgcacttctttgaggcctaccgtagtaaaggagataagttcctataaaaagaagacagaagcattctcagaaccctcttcgtgatgtttgcattcaactcacggtgctgaacctttctttgatagttcagctttgaaacactctttttgtagaaactgcaagtggatatttggtcctctctgaggatttcgttggaaacgggataaaccgcacagaactaaacagaagcattctcagaaccttcttcgtgatgtttgcattcaactcacagtgttgaacctttctttgatagttcaggtttgaaacggtctttctgtagaaactgcaagtagatatttggacctctctgaggatttcgttggaaacgggataaaccgcacagaactaaaacagaagcattcacagaaaactcttggtgacgactgagtttaactcacagagctgaacattcctttggatggagcagtttcgaaacacactatctgtagaatgtgcaagtggatatttgggcctctctgaggatttcgttggaaacgggataaaccgcacagaactaaacagaagcattctcagaaactactttgtgatgattgcattcaagtcacagagttgaacattcccttcgacagagcagtttggaaactctctttgtgtataatctgcaagtggagatatggaccgctttgaggcctatggtagtaaaggaaatagcttcatataaaagctagacagtagcattctcagaaacttctttgtgatgcttgcattcaactcacagagttgaactttcctttcgagagagaagctttgaaacactctttttccagaatctgcaagtggacatttggagggctttgaggcctgtggtggaaaaggaattaacttcccgtaaaagctagatagaagcattgtcagaaacttctttgtgatgattgcattcaactcacagagatgaaggttcctttacaaacagcagtttccaaacactctttctgtggaatctgcaagtggatatttggacctctttgaagatttcgttggaaacgggagaatcttcacagaaaagctaaacagaagcattctcagaaacttctctgtgatgtttgtgttcaactcccagagtttcacattgcttttcatagagtagttctgaaacatgcttttcgtagtgtctacaagtggacatttggagcgctttcaggcctgtggtggaaaacgaattatggtcacataaaaactggagagaagccttctcagaaacttctctgtgatgactgcattcaactcacagagttgaaccctcctatggatagagcagtgttgaaactctctttttgtggaatctgcaagtggatatgtggacctctccgaagatgtctttggaaacgggaatatcttcacataaaaactaaacagaagcattctcagaaacttcttggtgatgtttgcattcaaatcccagagttgaaccttcctttgatagttcaggtttgaaacactctttttgtaggatctgcaagtggatatttggaccactctgtggccttcgttcgaaacgggtatatcttcgcataaaatctagacagaagcattctcagaaaatactttgtgatgattgagttgaactcacagagctgaacattcctttggatggagcaggtttgagacacactttttgtagaatctacaagaggatatttggacctctctgaggatttcgttggaaacgggataactgcacctaactaaacggaagcattcccagaaactgctttgtgatgattgcattcacctcacagagttgaacattcctattgatagagcagtttggaaacactcttgttgtggaatgtgcaagtggagatttggagtgctttgaggcctatggtagtaaagggaatagcttcatagaaaaactagacagatgcattctcaggaactttttggtgatgtttgtattcaactcccagagttgaactttcctttggaaagagcagatatgaaacactctttttctagaatctgcaagtggacgtttggagggctttgtggtttgtggtggaaaaggaaatatcttcacctgaatactagatagaagcattctcagaagcttctctgtgatgactgcattcaactcacggagttgaacactccttttgagagcgcagttttgaaactctctttctgtggcatctgcaaggggacatgtagacctctttgaagatttcgttggaaacggaatcatcttcacataaaaactatacagaagcagtctcagaatcttctttgtgatgtttgcattcaaatccccgagttgaactttcctttcaaagttcacgtttgaaacactctttttgcaggatctacaagtggatatttggaccactctgtgtccttcgttcgaaacgggtatatcttcacatgacatctagacagaagctttctcagaaaattctttgggatgattgagttgaactcacagagctgagcattccttgcgatgtagcagtttagaaacacactttctgcagaatctgcaagtgcatatttggacctctgtgaggaattcgttggaaacgggataatttcagctgactaaacagaagcattctcagaaccttcttcgtgatgtctgcattcaactcacagtgtggaacctttctttgatagttcaggtttgaaacactctttttgtagaaactgcaaggggataattgcactctttgaggagtacccgtagtaaaggaaataacttcctataaaaagaagacagaagcattctcagaaccctcttcgtgatgtttgcattcaactcacagtgctgaacctttctttgatagttcagctttgaaacactctttttgtagaaactgcaagtggatatttggtcctctctgagcatttcgttggaaacgggataaactgcacagaactaaacagaagcattctcagaaccttcttcgtgatgtttgcattcaactcacagtgttgaacctttctttgatagttcaggtttgaaacggtctttctgtagaaactgcaagtagatatttggacctctctgaggatttcgttggaaacgggataacccgcacagaactaaaacagaagcattcacagaaaactcttggtgacgactgagtttaactcacagagctgaacattcctttggatggagcagtttcgaaacacactatttgtagaatgtgcaagtggatatttaggcctctctgaggatttcgttggaaacgggataaaccgcacagaactaaacagaagcattctcagaaactactttgtgatgattgcattcaagtcacagagttgaacattccctttgacagagcagtttggaaactctctttgtgtagaatctgcaagtggagatatggaccactttgaggcctatggtagtaaaggaaatagcttcatataaaagctagacagtagcattctcagaaacttctttgtgatgctcgcattcaactcacagagttgaactttcctttcgagagagaagctttgaaacactctttttccagaatctgcaagtggacatttggagggctttgaggcctgtggtggaaaaggaattatcttcccgtaaaagctagatagaagcattgtcagaaacttctttgtgatgattgcattcaactcacagagttgaaggttccttttcaaacagcagtttccaatcactctttctgtggaatctgcaagtggatatttgggcctctctgaggatttcgttggaaacgggataaaacgcacagaactaaaacagaagcattctcagaaacttctctgtgatgtttgtgttcaactcccagagtttcacgttgcttttcatagagtagttctgaaacatgcttttcgtagtgtctgcaagtggacatttggagcgctttcaggcctgtggtggaaaacgaattatggtcacataaaaactggagagaagccttctcagaaacttctctgtgatgattgcattcaactcacagagttgaaccctcctatggatagagcagtgttgaaactctctttttgtggaatctgcaagtggatatgtggacctctccgaagatgtctttggaaacgggaatatcttcacataaaaactaaacagaagcattctcagaaacttcttggtgatgtttgcattcaaatcccagagttgaaccttcctttgatagttcaggtttgaaacactctttctgtaggatctgcaagtggctatttggaccactctgtggccttcgttcgaaacgggtatatcttcgcataaaatctagacagaagcattctcagaaaatactttgtgatgattgagtttaaatcacagagctgaccattcctttggatggagcaggtttgagacacactttttgtagaatctacaagtggatatttggacctctctgaggatttcgttggaaacgggataactgcacctaactaaacggaagcattctcagaaactgctttgtgatgattgcattcacctcacagagttgaacattcctattgatagagcagtttggaaacactcttgttgtggaatgtgcaagtggagatttggagcgctttgaggcctatggtagtaaagggaatagcttcatagaaaaactagacagatgcattctcaggaactttttggtgatgtttgtattcaactcccagagttgaactttcctttggaaagagcagctatgaaacactctttttctagaatctgcaagtggacgtttggagggctttgtggtttgtggtggaaaaggaaatatcttcacctaaatactagacagaagcattctcagaagcttctctgtgatgactgcattcaactcacggagttgaacactccttttgagagcgcagttttgaaactctctttctgtggcatctgcaaggggacatgtagacctctttgaagatttcgttggaaacggaatcatcttcacataaaaactatacagaagcagtctcagaatcttctttgtgatgtttgcattcaaatcccagagttgaactttcctttcaaagttcacgtttgaaacactctttttgcaggatctacaagtggatatttggaccactctgtgtccttcgttcgaaacgggtatatcttcacacgacatctagacagaagctttctcagaaaattctttgggatgattgagtggaactcacagagctgaacattccttgcgatgtagcagtttagaaacacactttctgcagaatctgcaagtgcatatttggacctctctgaggaattcgttggaaacgggataatttcagctgactaaacagaagcattctcagaaccttcttcgtgatgtctgcattcaactcacagtgtggaacctttctttgatagttcaggtttgaaacactctttttgtagaaactgcaaggggataattgcacttctttgaggcctaccgtagtaaaggaaataacttcctatagaaagaagacagaagcattctcagaaccctcttcgtgatgtttgcattcaactcacagtgctgaacctttctttgatagttcagctttgaaacactcttcttgtagaaactgcaagtggatatttggtcctctctgaggatttcgttggaaacgggataaaccgcacagaactaaacagaagaattctcagagccctcttcgtgatgtttgcattcaactcacagtgctgaacctttctttgatagtgcagctttgaaacactctttttgtagaaactgcaagtggatgtttggtcctctctgaggatttcgttggaaacgggataaaccgcacagaactaaaacagaagcattgtcagaaacttctttgtgatgattgcattcaactcacagagttgaaggttccttttcaaacagcagtttccaatcactctttctgtggaatctgcaagtggatatttgggcctctctgaggatttcgttggaaacgggataaaacgcacagaactaaaacagaagcattctcagaaacttctctgtgatgtttgtgttcaactcccagagtttcacgttgcttttcatagagtagttctgaaacatgcttttcgtagtgtctgcaagtggacatttggagcgctttcaggcctgtggtggaaaacgaattatggtcacataaaaactggagagaagccttctcagaaacttctctgtgatgattgcattcaactcacagagttgaaccctcctatggatagagcagtgttgaaactctctttttgtggaatctgcaagtggatatgtggacctctccgaagatgtctttggaaacgggaatatcttcacataaaaactaaacagaagcattctcagaaacttcttggtgatgtttgcattcaaatcccagagttgaaccttcctttgatagttcaggtttgaaacactctttctgtaggatctgcaagtggctatttggaccactctgtggccttcgttcgaaacgggtatatcttcgcataaaatctagacagaagcattctcagaaaatactttgtgatgattgagtttaaatcacagagctgaccattcctttggatggagcaggtttgagacacactttttgtagaatctacaagtggatatttggacctctctgaggatttcgttggaaacgggataactgcacctaactaaacggaagcattctcagaaactgctttgtgatgattgcattcacctcacagagttgaacattcctattgatagagcagtttggaaacactcttgttgtggaatgtgcaagtggagatttggagcgctttgaggcctatggtagtaaagggaatagcttcatagaaaaactagacagatgcattctcaggaactttttggtgatgtttgtattcaactcccagagttgaactttcctttggaaagagcagctatgaaacactctttttctagaatctgcaagtggacgtttggagggctttgtggtttgtggtggaaaaggaaatatcttcacctaaatactagatagaagcattctcagaagcttctctgtgatgactgcattcaactcacggagttgaacactccttttgagagcgcagttttgaaactctctttctgtggcatccgcaaggggacatgtggacctctttgaagatttggttggaaacggaatcatcttcacataaaaactatacagaagcaatctcagaatcttctttgtgatgtttgcattcaaatcccagagttgaactttcctttcaaagttcacgtttgaaacactctttttgcaggatctacaagtggatatttggaccactctgtgtccttcgttcgaaacgggtatatcttcacacgacatctagacagaagctttctcagaaaattctttgggatgattgagtggaactcacagagctgaacattccttgcgatgtagcagtttagaaacacactttctgcagaatctgcaagtgcatatttggacctctctgaggaattcgttggaaacgggataatttcagctgactaaacagaagcattctcagaaccttcttcgtgatgtctgcattcaactcacagtgtggaacctttctttgatagttcaggtttgaaacactctttttgtagaaactgcaaggggataattgcacttctttgaggcctaccgtagtaaaggaaataacttcctatagaaagaagacagaagcattctcagaaccctcttcgtgatgtttgcattcaactcacagtgctgaacctttctttgatagttcagctttgaaacactcttcttgtagaaactgcaagtggatatttggtcctctctgaggatttcgttggaaacgggataaaccgcacagaactaaacagaagaattctcagagccctcttcgtgatgtttgcattcaactcacagtgctgaacctttctttgatagtgcagctttgaaacactctttttgtagaaactgcaagtggatgtttggtcctctctgaggatttcgttggaaacgggataaaccgcacagaactaaaacagaagcattgtcagaaacttctttgtgatgattgcattcaactcacagagttgaaggttccttttcaaacagcagtttccaatcactctttctgtggaatctgcaagtggatatttgggcctctctgaggatttcgttggaaacgggataaaacgcacagaactaaaacagaagcattctcagaaacttctctgtgatgtttgtgttcaactcccagagtttcacgttgcttttcatagagtagttctgaaacatgcttttcgtagtgtctgcaagtggacatttggagcgctttcaggcctgtggtggaaaacgaattatggtcacataaaaactggagagaagccttctcagaaacttctctgtgatgattgcattcaactcacagagttgaaccctcctatggatagagcagtgttgaaactctctttttgtggaatctgcaagtggatatgtggacctctccgaagatgtctttggaaacgggaatatcttcacataaaaactaaacagaagcattctcagaaacttcttggtgatgtttgcattcaaatcccagagttgaaccttcctttgatagttcaggtttgaaacactctttctgtaggatctgcaagtggctatttggaccactctgtggccttcgttcgaaacgggtatatcttcgcataaaatctagacagaagcattctcaggaaaatactttgtgatgattgagtttaaatcacagagctgaccattcctttggatggagcaggtttgagacacactttttgtagaatctacaagtggatatttggacctctctgaggatttcgttggaaacgggataactgcacctaactaaacggaagcattctcagaaactgctttgtgatgattgcattcacctcacagagttgaacattcctattgatagagcagtttggaaacactcttgttgtggaatgtgcaagtggagatttggagcgctttgaggcctatggtagtaaagggaatagcttcatagaaaaactagacagatgcattctcaggaactttttggtgatgtttgtattcaactcccagagttgaactttcctttggaaagagcagctatgaaacactctttttctagaatctgcaagtagacgtttggagggctttgtggtttgtggtggaaaaggaaatatcttcacctaaatactagatagaagcattctcagaagcttctctgtgatgactgcattcaactcacggagttgaacactccttttgagagcgcagttttgaaactctctttctgtggcatccgcaaggggacatgtggacctctttgaagatttcgttggaaacggaatcatcttcacataaaaactatacagaagcagtctcagaatcttctttgtgatgtttgcattcaaatcccagagttgaactttcctttcaaagttcacgtttgaaacactctttttgcaggatctacaagtggatatttggaccactctgtgtccttcgttcgaaacgggtatatcttcacacgacatctagacagaagctttctcagaaaattctttgggatgattgagtggaactcacagagctgaacattccttgcgatgtagcagtttagaaacacactttctgcagaatctgcaagtgcatatttggacctctctgaggaattcgttggaaacgggataatttcagctgactaaacagaagcattctcagaaccttcttcgtgatgtctgcattcaactcacagtgtggaacctttctttgatagttcaggtttgaaacactctttttgtagaaactgcaaggggataattgcacttctttgaggcctaccgtagtaaaggaaataacttcctatagaaagaagacagaagcattctcagaaccctcttcgtgatgtttgcattcaactcacagtgctgaacctttctttgatagttcagctttgaaacactcttcttgtagaaactgcaagtggatatttggtcctctctgaggatttcgttggaaacgggataaaccgcacagaactaaacagaagaattctcagagccctcttcgtgatgtttgcattcaactcacagtgctgaacctttctttgatagtgcagctttgaaacactctttttgtagaaactgcaagtggatgtttggtcctctctgaggatttcgttggaaacgggataaaccgcacagaactaaaacagaagcattgtcagaaacttctttgtgatgattgcattcaactcacagagttgaaggttccttttcaaacagcagtttccaatcactctttctgtggaatctgcaagtggatatttgggcctctctgaggatttcgttggaaacgggataaaacgcacagaactaaaacagaagcattctcagaaacttctctgtgatgtttgtgttcaactcccagagtttcacgttgcttttcatagagtagttctgaaacatgcttttcgtagtgtctgcaagtggacatttggagcgctttcaggcctgtggtggaaaacgaattatggtcacataaaaactggagagaagccttctcagaaacttctctgtgatgattgcattcaactcacagagttgaaccctcctatggatagagcagtgttgaaactctctttttgtggaatctgcaagtggatatgtggacctctccgaagatgtctttggaaacgggaatatcttcacataaaaactaaacagaagcattctcagaaacttcttggtgatgtttgcattcaaatcccagagttgaaccttcctttgatagttcaggtttgaaacactctttttgtaggatctgcaagtggatatttggaccactctgtggccttcgttcgaaacggggacatcttcgcataaaatctagacagaagcattctcagaaaatactttgtgatgattgagtttaactcacagcagctgaacattcctttggatggagcaggtttgagacacactttttgtagaatctacaagtggatatttggacctctctgaggatttcgttggaaacgggataactgcacctaactaaacggaagcattctcagaaactgctttgtgatgattgcattcacctcacagagttgaacattcctattgatagagcagtttggaaacactcttgttgtggaatgtgcaagtggagatttggagcgctttgaggcctatggtagtaaagggaatagcttcatagaaaaactagacagatgcattctcaggaactttttggtgatgtttgtattcatctcccagatttgaactttcctttggaaagagcagctatgaaacactctttttctagaatctgcaagtggacgtttggagggcttcgtggtttgtggtggaaaaggaaatatcttcacctaaatactagatagaagcattctcagaagcttctctgtgatgactgcattcaactcacggagttgaacactccttttgagagcacagttttgaaactctctttatgtggcatctgcaaggggacatgtagacctctttgaagatttcgttggaaacggaatcatcttcatataaaaactatacagaagcagtctcagaatcttctttgtgatgtttgcattcaaatcccagagttgaactttcctttcaaagttcacgtttgaaacactctttttgcaggatctacaagtggatatttggaccactctgtgtccttcgttcgaaacgggtatatcttcacatgacagctagacagaagctttctcagaaaattctttgggatgattgagtggaactcacagagctgaacattccttgcgatgtagcagtttagaaacacactttctgcagaatctgcaagtgcatatttggacctctctgaggaattcgttggaaacgggataatttcagctgactaaacagaagcattctcagaaccttcttcgtgatgtctgcattcaactcacagtgtggaacctttctttgatagttcaggtttgaaacactctttttgtagaaactgcaaggggataattgcacttctttgaggcctaccgtagtaaaggaaataacttcctatagaaagaagacagaagcattctcagaaccctcttcgtgatgtttgcattcaactcacagtgctgaacctttctttgatagttcagctttgaaacactcttcttgtagaaactgcaagtggatatttggtcctctctgaggatttcgttggaaacgggataaaccgcacagaactaaacagaagaattctcagagccctcttcgtgatgtttgcattcaactcacagtgctgaacctttctttgatagtgcagctttgaaacactctttttgtagaaactgcaagtggatgtttggtcctctctgaggatttcgttggaaacgggataaaccgcacagaactaaaacagaagcattgtcagaaacttctttgtgatgattgcattcaactcacagagttgaaggttccttttcaaacagcagtttccaatcactctttctgtggaatctgcaagtggatatttgggcctctctgaggatttcgttggaaacgggataaaacgcacagaactaaaacagaagcattctcagaaacttctctgtgatgtttgtgttcaactcccagagtttcacgttgcttttcatagagtagttctgaaacatgcttttcgtagtgtctgcaagtggacatttggagcgctttcaggcctgtggtggaaaacgaattatggtcacataaaaactggagagaagccttctcagaaacttctctgtgatgattgcattcaactcacagagttgaaccctcctatggatagagcagtgttgaaactctctttttgtggaatctgcaagtggatatgtggacctctccgaagatgtctttggaaacgggaatatcttcacataaaaactaaacagaagcattctcagaaacttcttggtgatgtttccattcaaatcccagagttgaaccttcctttgatagttcaggtttgaaacactctttttgtaggatctgcaagtggctatttggaccactctgtggccttcgttcgaaacgggtatatcttcgcataaaatctagacagaagcattctcagaaaatactttgtgatgattgagtttaaatcacagagctgaccattcctttggatggagcaggtttgagacacactttttgtagaatctacaagtggatatttggacctctctgaggatttcgttggaaacgggataactgcacctaactaaacggaagcattctcagaaactgctttgtgatgattgcattcacctcacagcagttgaacattcctattgatagagcagtttggaaacactcttgttgtggaatgtgcaagtggagatttggagcgctttgaggcctatggtagtaaagggaatagcttcatagaaaaactagacagatgcattctcaggaactttttggtcatgtttgtattcaacccccagagttgaactttcctttggaaagagcagctatgaaacactctttttctagaatctgcaagtggacgtttggagggctttgtggtttgtggtggaaaaggaaatatcttcacctaaatactagatagaagcattctcagaagcttctctgtgatgactgcattcaactcacggagttgaacactccttttgagagcgcagttttgaaactctctttctgtggcatctgcaaggggacatgtagacctctttgaagatttcgttggaaacggaatcatcttcacataaaaactatacagaagcagtctcagaatcttctttgtgatgtttgcattcaaatcccagagttgaactttcctttcaaagttcacgtttgaaacactctttttgcaggatctacaagtggatatttggaccactctgtgtccttcgttcgaaacgggtatatcttcacatgacatctagacagaagctttctcagaaaattctttgggatgattgagtggaactcacagagctgaacattccttgtaatgtagcagtttagaaacacactttctgcagaatctgcaagtgcatatttggacctctctgaggaattcgttggaaacgggataatttcagctgactaaacagaagcattctcagaaccttcttcgtgatgtctgcattcaactcacagtgtggaacctttctttgatagttcaggtttgaaacactctttttgtagaaactgcaaggggataattgcacttctttgaggcctaccgtagtaaaggaaataacttcctatagaaagaagacagaagcattctcagaaccctcttcgtgaagtttgcattcaactcacagtgctgaacctttctttgatagttcagctttgaaacactcttcttgtagaaactgcaagtggatatttggtcctctctgaggatttcgttggaaacgggataaaccgcacagaactaaacagaagaattctcagagccctcttcgtgatgtttgcattcaactcacagtgctgaacctttctttgatagtgcagctttgaaacactctttttgtagaaactgcaagtggatgtttggtcctctctgaggatttcgttggaaacgggataaaccgcacagaactaaaacagaagcattgtcagaaacttctttgtgatgattgcattcaactcacagagttgaaggttccttttcaaacagcagtttccaatcactctttctgtggaatctgcaagtggatatttgggcctctctgaggatttcgttggaaacgggataaaacgcacagaactaaaacagaagcattctcagaaacttctctgtgatgtttgtgttcaactcccagagtttcacgttgcttttcatagagtagttctgaaacatgcttttcgtagtgtctgcaagtggacatttggagcgctttcaggcctgtggtggaaaacgaattatggtcacataaaaactggagagaagccttctcagaaacttctctgtgatgattgcattcaactcacagagttgaaccctcctatggatagagcagtgttgaaactctctttttgtggaatctgcaagtggatatgtggacctctccgaagatgtctttggaaacgggaatatcttcacataaaaactaaacagaagcattctcagaaacttcttggtgatgtttgcattcaaatcccagagttgaaccttcctttgatagttcaggtttgaaacactctttttgtaggatctgcaagtggctatttggaccactctgtggccttcgttcgaaacgggtatatcttcgcataaaatctagacagaggcattctcagaaaatactttgtgatgattgagtttaaatcacagagctgaacattcctttggatggagcaggtttgagacacactttttgtagaatctacaagtggatatttggacctctctgaggatttcgttggaaacgggataactgcacctaactaaacggaagcattctcagaaactgctttgtgatgattgcattcacctcacagagttgaacattcctattgatagagcagtttggaaacactcttgttgtggaatgtgcaagtggagatttggagcgctttgaggcctatggtagtaaagggaatagcttcatagaaaaactagacagatgcattctcaggaactttttggtgatgtttgtattcaactcccagagttgaactttcctttggaaagagcagctatgaaacactctttttctagaatctgcaagtggacgtttggagggctttgtggtttgtggtggaaaaggaaatatcttcacctaaatactagagagaagcattctcagaagcttctctgtgatgactgcattcaactcacggagttgaacactccttttgagagcgcagttttgaaactccctttctgtggcatctgcaaggggacatgtagacctctttgaagatttcgttggaaacggaatcatcttcacataaaaactatacagaagcagtctcagaatcttctttgtgatgtttgcattcaaatcccagagttgaactttcctttcaaagttcacgtttgaaacactctttttgcaggatctacaagtggatatttggaccactctgtgtccttcgttcgaaacgggtatatcttcacatgacatctagacagaagctttctcagaaaattctttgggatgattgagttgaactcacagagctgaacattccttgcgatgtagcagtttagaaacacactttctgcagaatctgcaagtgcatatttggacctctctgaggaattcgttggaaacgggataatttcagctgactaaacagaagcattctcagaaccttcttcgtgatgtctgcattcaactcacagtgtggaaactttctttgatagttcaggtttgaaacactctttttgtagagactgcaaggggataattgcacttctttgaggcctaccgtagtaaaggaaataacttcctataaaaagaagacagaagcattctcagaaccctcttcttgatgtttgcattcaactcacactgctgaacctttctttgatagatcagctttgaaacactctttttgtagaaagtgcaaatggatatttggtcctctctgaggatttcattggaaacgggataaaccgcacagaacaaaacagaagcattctcagaaccttcttcgtgatgtttgcattcaactcacagtgctgaacctttctttgatagttcagctttgaaacactctttttgtagaaactgcaagtggatatttgggcctctctgaggatttcgttggaaacgggataaaccgcacagaactaaacagaagcattctcagaaccttcttcgtgatgtttgcattcaactcacagtgttgaacctttctttgatagttcaggttggaaacggtctttctgtagaaactgcaagtagatatttggacctctctgaggatttcgttggaaacgggataaaccgcacagaactaaaacagaagcattcacagaaaactcttggtgacgactgagtttaactcacagagctgaacattcctttggatggagcagtttcgaaacacactatttgtagaatgtgcaagtggatatttgggcctctctgaggatttcgttggaaacgggataaaccgcacagaactaaagagaagtattctcagaaactactttgtgatgattgcattcaagtcacagagttgaacattccctttgacagagcagtttggaaactctctttgtgtagaatctgcaagtggagatatggaccgctttgaggcctatggtagtaaaggaaatagcttcatataaaagctagacagtagcattctcagaaacttctttgtgatgcttgcattcaactcacagagttgaactttcctttcgagagagaagctttgaaacactctttttccagaatctgcaagtggacatttggagggctttgaggcctgtggtggaaaaggaattatcttcccgtaaaagctagatggaagcattgtcagaaacttctttgtgatgattgcattcaattcacagagttgaaggttccttttcaaacagcagtttccaatcactctttctgtggaatctgcaagtggatatttggacctattttgaagattttgttggaaacgggataatcttcacagaaaagctaaacagaagcattctcagaacttctctgtgatgtttgtgttcaactcccagagtttcacgttgcttttcatagagtagttctgaaacatgcttttcgtagtgtctgcaagtggacatttggagcgctttcaggcctgtggtggaaaacgaattatggtcacataaaaactggagagaagccttctcagaaacttctctgtgatgattgcattcaactcacagatttgaaccctcctatggatagagcattcttgaaactctctttttgtggaatctgcaagtggatatgtggacctctccgaagatgtctttggaaacgggaatatcttcacataaaaactaaacagaagcattctcagaaacttcttggtgatgtttgcattcaaatcccagagttgaaccttcctgtgatagttcaggtttgaaacactctttttgtaggatctgcaagtggatatttggaccactctgtggccttcgttcgaaacgggtacatcttcacataaaatctagacagaagcattctcagaaaatactttgtgatgattgagtttaactcacagagctgaacattcctttggatggagcaggtttgaaacacactttttgtagaatctgcaagtggatatttggacctctctgaggatttcgttggaaacgggataactgcacctaactaaacagaagcattctcagaaactactttgtgatgattgcattcacctcacagagttgaacattcctattgagagagcagtttggaaacactcttgttggagaatctgcaagtggagatttggagcgctttgaggcctatggtactaaagggaatagcttcatataaaaactaggcagatgcattctcaggaactttttggtgatgtttgtattcaactcccagagttgaactttcctttggaaagagcagctatgaaacactctttttctagaatctgcaagtggacgtttggagggctttgtggtttgtggtggaaaaggaaatatcttcacctaaatactagatagaagcattctcagaagcttctctgtgatgactgcattcaactcacggagttgaacactccttttgagagcgcagttttgaaactctctttctgtggcatctgcaaggggacatgtagacctctttgaagatttcgttggaaacggaatcatcttcacataaaaactatacagaagcagtctcagaatcttctttgtgatgtttgcattcaaatcccagagttgaactttcctttcaaagttcacgtttgaaacactctttttgcaggatctacaagtggatatttggaccactctgtgtccttcgttcgaaacgggtatatcttcacacgacatctagacagaagctttctcagaaaattctttgggatgattgagtggaactcacagagctgaacattccttgcgatgtagcagtttagaaacacactttctgcagaatctgcaagtgcatatttggacctctgtgaggaattcgttggaaacgggataatttcagctgactaaacagaagcattctcagaaccttcttcgtgatgtctgcattcaactcacagtgtggaacctttctttgatagttcaggtttgaaacactctttttgtagaaactgcaaggggataattgcacttctttgaggcctaccgtagtaaaggaaataacttcctatagaaagaagacagaagcattctcagaaccctcttcgtgatgtttgcattcaacacacagtgctgaacctttctttgatagttcagctttgaaacactcttcttgtagaaactgcaagtggatatttggtcctctctgaggatttcgttggaaacgggataaaccgcacagaactaaacagaagcattctcagaaccttcttcgtgatgtttgcattcaactcacagtgttgaacctttctttgatagttcaggtttgaaacggtctttctgtagaaactgcaagtagatatttggacctctctgaggatttcgttggaaacgggataacccgcacagaactaaaacagaagcattcacagaaaactcttggtgacgactgagtttaactcacagagctgaacattcctttgcatggagcagtttcgaaacacactatttgtagaatgtgcaagtggatatttaggcctctctgaggatttcgttggaaacgggataaaccgcacagaactaaacagaagcattctcagaaactactttgtgatgattgcattcaagtcacagagttgaacattccctttgacagagcagtttggaaactctctttgtgtagaatctgcaagtggagatatggaccgctttgaggcctatggtagtaaaggaaatagcttcatataaaagctagacagtagcattctcagaaacttctttgtgatgcttgcattcaactcacagagttgaactttcctttcgagagagaagctttgaaacactctttttccagaatgtgcaagtggacatttggggagctttgaggcctgtggtggaaaaggaattatcttcccgtaaaagctagatagaagcattgtcagaaacttctttgtgatgattgcattcaactcacagagttgaaggttccttttcaaacagcagtttccaatcactctttctgtggaatctgcaagtggatatttcgacctctttgaagatttcgttggaaacgggagaatcttcacagaaaagctaaacagaagcattctcagaaacttctctgtgatgtttgtgttcaactcccagagtttcacgttgcttttcatagagtagttctgaaacatgcttttcgtagtgtctgcaagtggacatttggagcgctttcaggcctgtggtggaaaacgaattatggtcacataaaaactggagagagccttctcagaaacttctctgtgatgattgcattcaactcacagagttgaaccctcctatggatagagcagtgttgaaactctctttttgtggaatctgcaagtggatatgtggacctctccgaagatgtctttggaaacgggaatatcttcacataaaaactaaacagaagcattctcagaaacttcttggtgatgtttgcattcaaatcccagagttgaaccttcctttgagagttcaggtttgaaacactctttttgtaggatctgcaagtggatatttggaccactctgtggccttcgttcgaaacgggtacatcttcgcataaaatctagacagaagcattctcagaaaatactttgtgatgattgagttgaactcacagagctgaacattcctttggatggagcaggtttgagacacactttttgtagaatctacaagtggatatttggacctctctgaggatttcgttggaaacgggataactgcacctaattaaacggaagcattctcagaaactgctttgtgatgattgcattcacctcacagagttgaacattcctattgatagagcagtttggaaacactcttcttgtggaatgtgcaagtggagatttggagcgctttgaggcctatggtagtaaagggaatagcttcatagaaaaactagacagatgcattctcaggaactttttggtgatgtttgtattcaactcccagagttgaactttcctttggaaagagcagctatgaaacactctttttctagaatctgcaagtggacgtttggaaggctttgtggtttgtggtggaaaaggaaatatcttcacctaaatactagatagaagcattctcagaagcttctctgtgatgactgcattcaactcacggagttgaacactccttttgagagcgcagttttgaaactctctttctgtggcatctgcaaggggacatgtagacctctttgaagatttcgttggaaacggaatcatcttcacatcaaaactatacagaagcagtctcagaatcttctttgtgatgtttgcattcaaatccccgagttgaactttcctttcaaagttcacgtttgaaacactctttttgcaggatctacaagtggatatttggaccactctgtgtccttcgttcgaaacgggtatatcttcacatgacatctagacagaagctttctcagaaaattctttgggatgattgagttgaactcacagagctgagcattccttgcgatgtagcagtttagaaacacactttctgcagaatctgcaagtgcatatttggacctctgtgaggaattcgttggaaacgggataatttcagctgactaaacagaagcattctcagaaccttcttcgtgatgtctgcattcaactcacagtgtggaacctttctttgatagttcaggtttgaaacactctttttgtagaaactgcaaggggataattgcactctttgaggagtaccgtagtaaaggaaataacttcctataaaaagaagacagaagcattctcagaaccctcttcgtgatgtttgcattcaactcacagtgctgaacctttctttgatagttcagctttgaaacactctttttgtagaaactgcaagtggatatttggtcctctctgaggaattcgttggaaacgggataaactgcacagaactaaacagaagcattctcagaaccttcttcgtgatgtttgcattcaactcacagtgttgaacctttctttgatagttcaggtttgaaacggtctttctgtagaaactgcaagtagatatttggacctctctgaggatttcgttggaaacgggataacccgcacagaactaaaacagaagcattcacagaaaactcttggtgacgactgagtttaactcacagagctgaacattcctttggatggagcagtttcgaaacacactatttgtagaatgtgcaagtggatatttaggcctctctgaggatttcgttggaaacgggataaaccgcacagaactaaacagaagcattctcagaaactactttgtgatgattgcattcaagtcacagagttgaacattccctttgacagagcagtttggaaactctctttgtgtagaatctgcaagtggagatatggaccgctttgaggtctatggtagtaaaggaaatagcttcatataaaagctagacagtagcattctcagaaacttctttgtgatgcttgcattcaactcacagagttgaactttcctttcgtgagagaagctttgaaacagtctttttccacaatatgcaagtggacatttggagggctttgaggcctgtggtggaaaaggaattatcttcctgtaaaagctagatagaagcattgtcagaaacttctttgtgatgattgcattcaagtcacagagttgaaggttccttttcaaagagcagtttccaatcactctttctgtggaatctgcaagtggatatttggacctctttgaagatttcgttggaaacgggagaatcttcacagaaaagttaaacagaagcattctcagaaacttctctgtgatgtttgtgttcaactcccagagtttcacattgcttctcatagagtagttctgaaacatgcttttcgtagtgtctgcaagtggacatttggagcgctttcaggcctgtggtggaaaacgaattatggtcacataaaaactggagagaagccttctcagaaacttctctgtgatgattgcattcaactcacagagttgaaccctcctatggatagagcagtgttgaaactctctttttgtggaatctgcaagcggatatgtggacctctccgaagatgtctttggcaacgggaatatcttcacataaaaactaaacagaagcattctcagaaacttcttggtgatgtttgcattcaaatcccagagttgaaccttcctttgagagttcaggtttgaaacactctttttgtaggatctgcaagtggatatttggaccactctgtggccttcgttcgaaacgggtacatcttcgcataaaatctagacagaagcattctcacaaaatactttgtgatgattgagtttaactcacagagctgaacattcctttggatggagcaggtttgagacacactttttgtagaatctacaagtggatatttggacctctctgaggatttcgttggaaacgggataactgcacctaactaaacggaagcattctcagaaactgctttgtgatgattgcattcacctcacagagttgaacattcctattgatagagcagtttggaaacactcttgttgtggaatgtgcaagtggagatttggagcgctttgaggcctatggtagtaaagggaatagcttcatagaataactagacagatgcattctcaggaactttttggtgatgtttgtattcaactcccagagttgaactttcctttggaaagagcagctatgaaacactctttttctagaatctgcaagtggacgtttggagggctttgtggtttgtggtggaaaaggaaatatcttcacctaaatactagagagaagcattctcagaagcttctctgtgatgactgcattcaactcacggagttgaacactccttttgagagcgcagttttgaaactctctttctgtggcatctgcaaggggacatgtagacctctttgaagatttcgttggaaacggaatcatcttcacataaaaactatacagaagcagtctcagaatcttctttgtggtgtttgcattcaaatcccagagttgaactttcctttcaaagttcacgtttgaaacactctttttgcaggatctacaagtggatatttggaccactctgtgtccttcgttcgaaacgggtatatcttcacatgacatctagacagaagctttctcagaaaattctttgggatgattgagtggaactcacagagctgaacattccttgcgatgtggcagtttagaaacacactttctgcagaatctgcaagtgcatatttggacctctccgaggaattcgttggaaacgggataatttcagctgactaaacagaagcattctcagaaccttcttcgtgatgtctgcattcaactcacagtgtggaacctttctttgatagttcaggtttgaaacactctttttgtagaaactgcaaggggataattgcacttctttgaggcctaccgtagtaaaggaaataacttcctatagaaagaagacagaagcattctcagaaccctcttcgtgatgtttgcattcaactcacagtgctgaacctttctttgatagttcagctttgaaacactcttcttgtagaaactgcaagtggatatttggtcctctctgaggatttcgttggaaacgggataaaccgcacagaactaaacagaagaattctcagagccctcttcgtgatgtttgcattcaactcacagtgctgaacctttctttgatagtgcagctttgaaacactctttttgtagaaactgcaagtggatgtttggtcctctctgaggatttcgttggaaacgggataaaccgcacagaactaaaacagaagcattgtcagaaacttctttgtgatgattgcattcaactcacagagttgaaggttccttttcaaacagcagtttccaatcactctttctgtggaatctgcaagtggatatttgggcctctctgaggatttcgttggaaacgggataaaacgcacagaactaaaacagaagcattctcagaaacttctctgtgatgtttgtgttcaactcccagagtttcacgttgcttttcatagagtagttctgaaacatgcttttcgtagtgtctgcaagtggacatttggagcgctttcaggcctgtggtggaaaacgaattatggtcacataaaaactggagagaagccttctcagaaacttctctgtgatgattgcattcaactcacagagttgaaccctcctatggatagagcagtgttgaaactctctttttgtggaacctgcaagtggatatgtggacctctccgaagatgtctttggaaacgggaatatcttcacataaaaactaaacagaagcattctcagaaacttcttggtgatgtttgcattcaaatcccagagttgaaccttcctttgatagttcaggtttgaaacactctttctgtaggatctgcaagtggctatttggaccactctgtggccttcgttcgaaacgggtatatcttcgcataaaatctagacagaaagcattctcagaaaatactttgtgatgattgagtttaaatcacagagctgaacattcctttggatggagcaggtttgagacacactttttgtagaatctacaagtggatatttggacctctctgaggatttcgttggaaacgggataactgcacctaactaaacggaagcattctcagaaactgctttgtgatgattgcattcacctcacagagttgaacattcctattgatagagcagtttggaaacactcttgttgtggaatgtgcaagtggagatttggagcgctttgaggcctatgatagtaaagggaatagcttcatagaaaaactagacagatgcattctcaggaactttttggtgatgtttgtattcaactcccagagttgaactttcctttggaaagagcagctatgaaacactctttttctagaatctgcaagtggacgtttggagggctttgtggtttgtggtggaaaaggaaatatcttcaccgaaatactagagagaagcattctcagaagcttctctgtgatgactgcattcaactcacggagttgaacactccttttgagagcgtagttttgaaactctctttctgtggcatctgcaaggggacatgtagacctctttgaagatttcgttggaaacggaatcatcttcacataaaaactatacagaagcagtctcagaatcttctttgtgatgtttgcattcaaatcccagagttgaactttcctttcaaagttcacgtttgaaacactctttttgcaggatctacaagtggatatttggaccactctgtgtccttcgttcgaaacgggtatatcttcacacgacatctagacagaagctttctcagaaaattctttgggatgattgagtggaactcacagagctgaacattccttgcgatgtagcagtttagaaacacactttctgcagaatctgcaagtgcatatttggacctctctgaggaattcgttggaaacgggataatttcagctgactaaacagaagcattctcagaaccttcttcgtgatgtctgcattcaactcacagtgtggaacctttctttgatagttcaggtttgaaacactctttttgtagaaactgcaaggggataattgcacttctttgaggcctaccgtagtaaaggaaataacttcctatagaaagaagacagaagcattctcagaaccctcttcgtgatgtttgcattcaactcacagtgctgaacctttctttgatagttcagctttgaaacactcttcttgtagaaactgcaagtggatatttggtcctctctgaggatttcgttggaaacgggataaaccgcacagaactaaacagaagaattctcagagccctcttcgtgatgtttgcattcaactcacagtgctgaacctttctttgatagtgcagctttgaaacactctttttgtagaaactgcaagtggatgtttggtcctctctgaggatttcgttggaaacgggataaaccgcacagaactaaaacagaagcattgtcagaaacttctttgtgatgattgcattcaactcacagagttgaaggttccttttcaaacagcagtttccaatcactctttctgtggaatctgcaagtggatatttgggcctctctgaggatttcgttggaaacgggataaaacgcacagaactaaaacagaagcattctcagaaacttctctgtgatgtttgtgttcaactcccagagtttcacgttgcttttcatagagtagttctgaaacatgcttttcgtagtgtctgcaagtggacatttggagcgctttcaggcctgtggtggaaaacgaattatggtcacataaaaactggagagaagccttctcagaaacttctctgtgatgattgcattcaactcacagagttgaaccctcctatggatagagcagtgttgaaactctctttttgtggaatctgcaagtggatatgtggacctctccgaagatgtctttggaaacgggaatatcttcacataaaaactaaacagaagcattctcagaaacttcttggtgatgtttgcattcaaatcccagagttgaaccttcctttgatagttcaggtttgaaacactctttctgtaggatctgcaagtggctatttggaccactctgtggccttcgttcgaaacgggtatatcttcgcataaaatctagacagaagcattctcagaaaatactttgtgatgattgagtttaaatcacagagctgaacattcctctggatggagcaggtttgagacacactttttgtagaatctacaagtggatatttggacctctctgaggatttcgttggaaacgggataactgcacctaactaaacggaagcattctcagaaactgctttgtgatgattgcattcacctcacagagttgaacattcctattgatagagcagtttggaaacactcttcttgtggaatgtgcaagtggagattcggagcgctttgaggcctatggtagtaaagggaatagcttcatagaaaaactagacagatgcattctcaggaactttttggtgatgtttgtattcaactcccagagttgaactttcctttggaaagagcagctatgaaacactctttttctagaatctgcaagtggacgtttggagggctttgtggtttgtggtggaaaaggaaatatcttcacctaaatactagatagaagcattctcagaagcttctctgtgatgactgcattcaactcacggagttgaacactccttttgagagcgcagttttgaaactctctttctgtggcatccgcaaggggacatgtagacctctttgaagatttcgttggaaacggaatcatcttcacatcaaaactatacagaagcagtctcagaatcttctttgtgatgtttgcattcaaatccctgagttgaactttcctttccaagttcacgtttgaaacactctttttgcaggatctacaagtggatatttggaccactctgtgtccttcgttcgaaacgggtatatcttcacatgacatctagacagaagctttctcagaaaattctttgggatgattgagttgagcaaacagagctgaacactccttgtgatgtagcagtttagaaacacactttctgcagaatctgcaagtgcatatgtggacctctctgaggaattcgttggaaacgggataatttcagctgactaaacagaagcattctcagaaccttcttcgtgatgtctgcgttcaactcacagtgtggaacctttctttgatagttcaggtttgaaacactctttttgtagaaactgcaaggggatcattgcacttctttgaggcctaccgtagtaaaggagataactttctacaaaaagaagacagaagcattctcagaaccctcttcgtgatgtttgcattcaactcacagtgctgaacctttctttgatagttcaggtttgaaacactctttttgtagaaactgcaagtggatatttgggcctctctgaggatttcgttggaaacgggataaaccgcacagaaataaacagaagcattctcagaaccttcttcgtgatgtttgcattcaactcacagtgttgaacctttctttgatagttcaggtttgaaacggtctttctgtagaaactgcaagtagatatttggacctctctgaggatttcgttggaaacgggataaaccgcacacaactaaaacagaagcattcacagaaaactcttggtgacgactgagtttaactcacagagctgaacattcgtttggatggagcagtttcgaaacacactatttgtagaatgtgcaagtggatatgtgggcctctctgaggatttcgttggaaacgggataaaccgcacagaactaaacagaagcattctcagaaactactttgtgatgattgcattcaagtcacagagttgaacattccctttgacagagcagtttggaaactctctttgtgtagaatctgcaagtggagatatggaccgctttgaggcctatggtagtaaaggaaatagcttcatataaaagctagacagtagcattctcagaaacttctttgtgatgcttgcattcaactcacagagttgaactttcctttcgagagagaagctttgaaacactctttttccagaatgtgcaagtggacatttggggagctttgaggcctggggtggaaaaggaattatcttcccgtaaaagctagatagaagcattgtcagaaacttctttgtgatgattgcattcaactcacggagttgaaggttccttttcaaacagcagtttccaatcactctttctgtggaatctgcaagtggatatttcgacctctttgaagatttcgttggaaacgggagaatcttcacagaaaagctaaacagaagctttctcagaaacttctctgtgatgtttgtgttcaactcccagagtttcacattgcatttcatagagtagttctgaaacatgcttttcgtagtgtctgcaagtggacgtttggagcgctttgaggcctgtggtggaaaacgaattatggtcacataaaaactggagagaagctttctcagaaacttctctgtgatgattgcattcaactcacagagttgaaccctcctatggatatagcagtgttgaaactctctttttgtggaatctgcaagtggatatgtggacctctccgaagatgtctttggaaacgggaatatcttcacataaaaactaaacagaagcattctcagaaacttcttggtgatgtttgcattcaaatcccagagttgaaccttcctttgatagttcaggtttgaaacactctttttgtaggatctgcaagtggatatttggaccactctgtggccttcgttcgaaacgggtatatcttcgcataaaatctagacagaagcattctcagaaaatactttgtgatgattgagtttaaatcacagagctgaacattcctttggatggagcaggtttgagacacactttttgtagaatctacaagtggatatttggacctctctgaggatttcgttggaaacgggataactgcacctaactaaacggaagcattctcagaaactgctttgtgatgattgcattcacctcacagagttgaacattcctattgatagagcagtttggaaacactcttgttgtggaatgtgcaagtggagatttggagcgctttgaggcctatggtagtaaagggaatagcttcatagaaaaactagacagatgcattctcaggaactttttggtgatgtttgtattcaactcccagagttgaactttcctttggaaagagcagctatgaaacactgtttttctagaatctgcaagtggaggtttggagggctttgtggtttgtggtggaaaaggaaatatcttcacctaaatactagatagaagcatcctcagaagcttctctgtgatgactgcattcaactcacggagttgaacactccttttgagagcgcagttttgaaactctctttctgtggcatctgcaaggggacatgtagacctctttgaagatttcgttggaaacggaatcatcttcacataaaaactatacagaagcagtctcagaatcttctttgtgatgtttgcattcaaatccccgagttgaactttcctttcaaagttcacgtttgaaacactctttttgcaggatctacaagtggatatttggaccactctgtgtccttcgttcgaaacgggtatatcttcacatgacatctagacagaagctttctcagaaaattctttgggatgattgagttgaactcacagagctgagcattccttgcgatgtagcagtttagaaacacactttctgcagaatctgcaagtgcatatttggacctctgtgaggaattcgttggaaacgggataatttcagctgactaaacagaagcattctcagaaccttcttcgtgatgtctgcattcaactcacagtgtggaacctttctttgatagttcaggtttgaaacactctttttgtagaaactgcaaggggataattgcactctttgaggagtaccgtagtaaaggaaataacttcctataaaaagaagacagaagcattctcagaaccctcttcgtgatgtttgcattcaactcacagtgctgaacctttctttgatagttcagctttgaaacactctttttgtagaaactgcaagtggatatttggtcctctctgaggaattcgttggaaacgggataaactgcacagaactaaacagaagcattctcagaaccttcttcgtgatgtttgcattcaactcacagtgttgaacctttctttgatagttcaggtttgaaacggtctttctgtagaaactgcaagtagatatttggacctctctgaggatttcgttggaaacgggataacccgcacagaactaaaacagaagcattcacagaaaactcttggtgacgactgagtttaactcacagagctgaacattcctttggatggagcagtttcgaaacacactatttgtagaatgtgcaagtggatatttaggcctctctgaggattacgttggaaacgggataaaccgcacagaactaaacagaagcattctcagaaactactttgtgatgattgcattcaagtcacagagctgaacattccctttgacagagcagtttggaaactctctttgtgtagaatctgcaagtggagatatggaatgctttgaggactatggtagtaaaggaaatagcttcatataaaagctagacagtagcattctcagaaacttctttgtgatgcttgcattcaactcacagagttgaactttcctttcgagagagaagctttgaaacactctttttccagaatctgcaagtggacatttggagggctttgaggcctgtggtggaaaaggaattatcttcccgtaaaagctggatagaagcattgtcagaaacttctttgtgatgattgcattcaactcacagagttgaaggttccttttcaaacagcagtttccaaacactctttctgtggaatctgcaagtggatgtttggacctctttgaagatttcgttggaaacgggagaatcttcacagaaaagctaaacagaagcattctcagaaacttctctgtgatgtttgtgttcaactcccagagtttcacattgcttttcatagagtagttctgaaacatgcttttcgtagtgtctgcaagtggacatttggagcgctttcaggcctgtgttggaaaacgaattatggtcacataaaaactggagagaagccttctcagaaacttctctgtgatgattgcattcaactcacagagttgaaccctcctatggatagagcagtgttgaaactctctttttgtggaatctgcaagtggatatgtggacctctccgaagatgtctttggaaacgggaatatcttcacataaaaactaaacgagaagcattctcagaaacttcttggtgatgtttgcattcaaatcccagaggtgaaccttcctttgatagttcaggtttgaaacactctttttgtaagatctgcaagtggctatttagaccactctgtggccttcgttcgaaacgggtatatcttcgcataaaatctagacagaagcattctcagaaaatactttgtgatgattgagtttaaatcacagagctgaccattcctttggatggagcaggtttgagacacactttttgtagaatctacaagtggatatttggacctctctgaggatttcgttggaaacgggataactgcacctaactaaacggaagcattctcagaaactgctttgtgatgattgcattcacctcacagagttgaacattcctattgatagagcagtttggaaacactcttgttgtggaatgtgcaagtggagatttggagcgctttgaggcctgtggtagtaaagggaatagcttcatagaaaaactagacagatgcattctcaggaactttttggtgatgtttgtattcaactcccagagttgaactttcctttggaaagagcagctatgaaacactctttttctagaatctgcaagtggacgtttggagggctttgtggtttgtggtggaaaaggaaatatcttcacctaaatactagatagaagcattctcagaagcttctctgtgatgactgcattcaactcatggagttgaacactccttttgagagcgcagttttgaaactctctttctgtggcatccgcaaggggacatgtggacctctttgaagatttcgttggaaacggaatcatcttcacataaaaactatacagaagcagtctcagaatcttctttgtgatgtttgcattcaaatcccagagttgaactttcctttcaaagttcacgtttgaaacactctttttgcaggatctacaagtggatatttggaccactctgtgtccttcgttcgaaacgggtatatcttcacatgacatctagacagaagctttctcagaaaattctttgggatgattgagtggaactcacagagctgaacattccttgcgatgtagcagtttagaaacacactttctgcagaatctgcaagtgcatatttggacctctctgaggaattcgttggaaacgggataatttcagctgactaaacagaagcattctcagaaccttcttcgtgatgtctgcattcaactcacagtgtggaacctttctttgatagttcaggtttgaaacactctttttgtagaaactgcaaggggataattgcacttctttgaggcctaccgtagtaaaggaaataacttcctatagaaagaagacagaagcattctcagaaccctcttcgtgatgtttgcattcaactcacagtgctgaacctttctttgatagttcagctttgaaacactcttcttgtagaaactgcaagtggatatttggtcctctctgaggatttcgttggaaacgggataaaccgcacagaactaaacagaagcattctcagaaccttcttcgtgatgtttgcattcaactcacagtgttgaacctttctttgatagttcaggttggaaacggtctttctgtagaaactgcaagtagatatttggacctctctgaggatttcgttggaaacgggataaaccgcacagaactaaaacagaagcattcacagaaaactcttggtgacgactgagtttaactcacagagctgaacattcctttggatggagcagtttcgaaacacactatttgtagaatgtgcaagtggatatttgggcctctctgaggatttcgttggaaacgggataaaccgcacagaactaaagagaagcattctcagaaactactttgtgatgattgcattcaagtcacagagttgaacattccctttgacagagcagtttggaaactctctttgtgtagaatctgcaagtggagatatggaccgctttgaggcctatggtagtaaaggaaagagcttcatataaaagctagacagtagcattctcagaaacttctttgtgatgcttgcattcaactcacagagttgaactttcctttcgagagagaagctttgaaacactctttttccagaatgtgcaagtggagatttggagggctttgaggcctgtggtggaaaaggaattatcttcccgtaaaagctagatagaagcattgtcagaaacttctttgtgatgattgcattcaactcacagagttgaaggttccttttcaaacagcagtttccaatcactctttgtgtggaatctgcaagtggatatttggacctattttgaagatttcgttggaaacgggataatcttcacagaaaagctaaacagaagcattctcagaaacttctctgtgatgtttgtgttcaactcccagagtttcacattgcttttcatagagtagttctgaaacatgcttttcgtagtgtctgcaagtggacatttggagcgctctcaggcctgtggtgcaaaacgaattatggtcacataaaaactggagagaagccttctcagaaacttctctgtgatgattgcattcaactcacagagttgaaccctcctatggatagagcagtgttgaaactctctttttgtggaatctgcaagtggatatgtggacctctccgaagatgtctttggaaacgggaatatcttcacataaaaactaaacagaagcattctcagaaacttcttggggatgtttgcattcaaatcccagagttgaaccttcctttgatagttcaggtttgaaacactctttttgtaggatctgcaagtggctatttggaccactctgtggccttcgttcgaaacgggtatatcttcgcataaaatctagacagaagcattctcagaaaatactttgtgatgattgagttgaactcacagagctgaacattcctttggatggagcaggtttgagacacactttttgtagaatctacaagtggatatttggacctctctgaggatttcgttggaaacgggataactgcacctaactaaacggaagcattctcagaaactgctttgtgatgattgcattcacctcacagagttgaacattcctattgatagagcagtttggaaacactcttcttgtggaatgtgcaagtggagatttggagcgctttgaggcctatggtagtaaagggaatagcttcatagaaaaactagacagatgcattctcaggaactttttggtgatgtttgtattcaactcccagagttgaactttcctttggaaagagcagctatgaaacactctttttctagaatctgcaagtggacgtttggagggctttgtggtttgtggtggaaaaggaaatatcttcacctaaatactagatagaagcattctcagaagcttctctgagatgactgcattcaactcacggagttgaacactccttttgagagcgcagttttgaaactctctttctgtggcatctgcaaggggacatgtagacctctttgaagatttcgttggaaacggaatcatcttcacataaaaactatacagaagcagtctcagaatcttctttgtgatgtttgcattcaaatccccgagttgaactttcctttcaaagttcacgtttgaaacactctttttgcaggatctacaagtggatatttggaccactctgtgtccttcgttcgaaacgggtatatcttcacatgacatctagacagaagctttctcagaaaattctttgggatgattgagtagaactcacagagctgagcattccttgcgatgtagcagtttagaaacacactttctgcagaatctgcaagtgcatatttggacctctgtgaggaattcgttggaaacgggataatttcagctgactaaacagaagcattctcagaaccttcttcgtgatgtctgcattcaactcacagtgtggaacctttctttgatagttcaggtttgaaacactctttctgtagaaactgcaaggggataattgcactctttgaggagtaccgtagtaaaggaaataacttcctataaaaagaagacagaagcattctcagaaccctcttcgtgatgtttgcattcaactcacagtgctgaacctttctttgatagttcagctttgaaacactctttttgtagaaactgcaagtggatatttggtcctctctgaggatttcgttggaaacgggataaactgcacagaactaaacagaagcattctcagaaccttcttcgtgatgtttgcattcaactcacagtgtggaacctttctttgatagttcaggtttgaaacggtctttctgtagaaactgcaagtagatatttggacctctctgaggatttcgttggaaacgggataacccgcacagaactaaaacagaagcattcacagaaaactcttggtgacgactgagtttaactcacagagctgaacattcctttggatggagcagtttcgaaacacactatttgtagaatgtgcaagtggatatttgggcctctctgaggatttcgttggaaacgggataaaccgcacagaactaaacagaagcattctcagaaactactttgtgatgattgcattcaagtcacagagttgaacattccctttgacagagcagtttggaaactctctttgtgtagaatctgcaagtggagatatggaccgctttgaggcctatggtagtaaaggaaatagcttcatataaaagctagacagtagcattctcagaaacttctttgtgatgcttgcattcaactcacagagttgaactttcctttcgagagagaagctttgaaacactctttttccagaatctgcaagtggacatttggagggctttgaggcctgtggtggaaaaggaattatcttcccgtaaaagctagatagaagcattgtcagaaacttctttgtgatgattgcattcaactcacagagttgaaggttccttttcaaagagcagtttccaatcactctttctgtggaatctgcaagtggatatttggacctattttgaagatttcgttggaaacgggagaatcttcacaggaaagctaaacagaagcattctcagaaacttctctgtgatgtttgtgttcaactcccagagtttcacattgcttttcatagagtagttctgaaacatgcttttcgtagtgtctacaagtggacatttggagcgctttcaggcctgtggtggaaaacgaattatggtcacataaaaactggagagaagccttctcagaaacttctctgtgatgattgcattcaactcacagagttgaaccctcctatggatagagcagtgttgaaactctctttttgtggaatctgcaagtggatatgtggacctctccgaagatgtctttggaaacgggaatatcttcacataaaaactaaacagaagcattctcagaaacttcttggtgatgtttgcattcaaatcccagagttgaaccttcctttgatagttcaggtttgaaacactctttttgtaggatctgcaagtggatatttggaccactctgtggccttcgttcgaaacgggtatatcttcgcataaaatctagacagaagcattctcagaaaatactttgtgatgattgagtttaactcacagagctgaacattcctttggatggagcaggtttgagacacaccttttgtagaatctacaagtggatatttggacctctctgaggatttcgttggaaacgggataactgcacctaactaaacggaagcattctcagaaactgctttgtgatgattgcattcacctcacagagttgaacattcctattgatagagcagtttggaaacactcttgttgtggaatgtgcaagtggagatttggagcgctttgaggcctatggtagtaaagggaatagcttcatagaaaaactagacagatgcattctcaggaactttttggtgatgtttgtattcaactcccagagttgaactttcctttggaaagagcagctatgaaacactctttttctagaatctgcaagtggacgtttggagggctttgtggtttgtggtggaaaaggaaatatcttcacctaaatactagatagaagcatcctcagaagcttctctgtgatgactgcattcaactcacggagttgaacactccttttgagagcgcagttttgaaactctctttctgtggcatctgcaaggggacatgtagacctctttgaagatttcgttggaaacggaatcatcttcacataaaaactatacagaagcagtctcagaatcttctttgtgatgtttgcattcaaatccccgagttgaactttcctttcaaagttcacgtttgaaacactctttttgcaggatctacaagtggatatttggaccactctgtgtccttcgttcgaaacgggtatatcttcacatgacatctagacagaagctttctcagaaaattctttgggatgattgagttgaactcacagagctgagcattccttgcgatgtagcagtttagaaacacactttctgcagaatctgcaagtgcatatttggacctctgtgaggaattcgttggaaacgggataatttcagctgactaaacagaagcattctcagaaccttcttcgtgatgtctgcattcaactcacagtgtggaacctttctttgatagttcaggtttgaaacactctttttgtagaaactgcaaggggatcattgcactctttgaggagtaccgtagtaaaggaaataacttcctataaaaagaagacagaagcattctcagaaccctcttcgtgatgtttgcattcaactcacagtgctgaacctttctttgatagttcagctttgaaacactctttttgtagaaactgcaagtggatatttggtcctctctgagcatttcgttggaaacgggataaactgcacagaactaaacagaagcattctcagaaccttcttcgtgatgtttgcattcaactcacagtgttgaacctttctttgatagttcaggtttgaaacggtctttctgtagaaactgcaagtagatatttggacctctctgaggatttcgttggaaacgggataacccgcacagaactaaaacagaagcattcacagaaaactcttggtgacgactgagtttaactcacagagctgaacattcctttggatggagcagtttcgaaacacactatttgtagaatgtgcaagtggatatttaggcctctctgaggatttcgttggaaacgggataaaccgcacagaactaaacagaagcattctcagaaactactttgtgatgattgcattcaagtcacagagttgaacattccctttgacagagcagtttggaaactctctttgtgtagaatctgcaagtggagatatggaccgctttgaggcctatggtagtaaaggaaatagcttcatataaaagctagacagtagcattctcagaaacttctttgtgatgcttgcattcaactcacagagttgaactttcctttcgagagagaagctttgaaacactctttttccagaatctgcaagtggacatttggagggctttgaggcctgtggtggaaaaggaattatcttcccgtaaaagctagatagaagcattgtcagaaacttctttgtgatgattgcattcaactcacagagttgaaggttccttttcaaagagcagtttccaatcactctttgtgtggaatctgcaagtggatatttggacctattttgaagatttcgttggaaacgggagaatcttcacaggaaagctaaacagaagcattctcagaaacttctctgtgatgtttgtgttcaactcccagagtttcacattgcttttcatagagtagttctgaaacatgcttttcgtagtgtctacaagtggacatttggagcgctttcaggcctgtggtggaaaacgaattatggtcacataaaaactggagagaagccttctcagaaacttctctgtgatgattgcattcaactcacagagttgaaccctcctatggatagagcagtgttgaaactctctttttgtggaatctgcaagtggatatgtggacctctccgaagatgtctttggaaacgggaatatcttcacataaaaactaaacagaagcattctcagaaacttcttggtgatgtttgcattcaaatcccagagttgaaccttcctttgatagttcaggtttgaaacactctttttgtaggatctgcaagtggatatttggaccactctgtggccttcgttcgaaacgggtatatcttcgcataaaatctagacagaagcattctcagaaaatactttgtgatgattgagtttaactcacagagctgaacattcctttggatggagcaggtttgagacacactttttgtagaatctacaagtggatatttggacctctctgaggatttcgttggaaacgggataactgcacctaactaaacggaagcattctcagaaactgctttgtgatgattgcattcacctcacagagttgaacattcctattgatagagcagtttggaaacactcttgttgtggaatgtgcaagtggagatttggagcgctttgaggcctatggtagtaaagggaatagcttcatagaaaaactagacagatgcattctcaggaactttttggtgatgtttgtattcaactcccagagttgaactttcctttggaaagagcagctatgaaacactgtttttctagaatctgcaagtggacgtttggagggctttgtggtttgtggtggaaaaggaaatatcttcacctaaatactagatagaagcatcctcagaagcttctctgtgatgactgcattcaactcacggagttgaacactccttttgagagcgcagttttgaaactctctttctgtggcatctgcaaggggacatgtagacctctttgaagatttcgttggaaacggaatcatcttcacataaaaactacacagaagcagtctcagaatcttctttgtgatgtttgcattcaaatcccagagttgaacttgcctttcaaagttcacgtttgaaacactctttttgcaggatctacaagtggatatttggaccactctgtgtccttcgttcgaaacgggtatatcttcacatgacatctagacagaagctttctcagaaaattctttgggatgattgagttgagcaaacagagctgaacactccttgtgatgtagcagtttagaaacacactttctgcagaatctgcaagtgcatatgtggacctctctgaggaattcgttggaaacgggataatttcagctgactaaacagaagcattctcagaaccttcttcgtgatgtctgcattcaactcacagtgtggaacctttctttgatagttcaggtttgaaacactctttttgtagaaactgcaaggggatcattgaacttctttgaggcctaccgtagtaaaggagataacttcctataaaaagaagacagaagcattctcagaaccctcttcgtgatgtttgcattcaactcacagtgctgaacctttctttgatagttcagctttgaaacactcttcttgtagaaactgcaagtggatatttggtcctctctgaggatttcgttggaaacgggataaaccgcacagaactaaacagaagaattctcagagccctcttcgtgatgtttgcattcaactcacagtgctgaacctttctttgatagtgcagctttgaaacactctttttgtagaaactgcaagtggatgtttggtcctctctgaggatttcgttggaaacgggataaaccgcacagaactaaaacagaagcattgtcagaaacttctttgtgatgattgcattcaactcacagagttgaaggttccttttcaaacagcagtttccaatcactctttctgtggaatctgcaagtggatatttgggcctctctgaggatttcgttggaaacgggataaaacgcacagaactaaaacagaagcattctcagaaacttctctgtgatgtttgtgttcaactcccagagtttcacgttgcttttcatagagtagttctgaaacatgcttttcgtagtgtctgcaagtggacatttggagcgctttcaggcctgtggtggaaaacgaattatggtcacataaaaactggagagaagccttctcagaaacttctctgtgatgattgcattcaactcacagagttgaaccctcctatggatagagcagtgttgaaactctctttttgtggaatctgcaagtggatatgtggacctctccgaagatgtctttggaaacgggaatatcttcacataaaaactaaacagaagcattctcagaaacttcttggtgatgtttgcattcaaatcccagagttgaaccttcctttgatagttcaggtttgaaacactctttctgtaggatctgcaagtggctatttggaccactctgtggccttcgttcgaaacgggtatatcttcgcataaaatctagacagaagcattctcagaaaatactttgtgatgattgagtttaaatcacagagctgaccattcctttggatggagcaggtttgagacacactttttgtagaatctacaagtggatatttggacctctctgaggatttcgttggaaacgggataactgcacctaactaaacggaagcattctcagaaactgctttgtgatgattgcattcacctcacagagttgaacattcctattgatagagcagtttggaaacactcttgttgtggaatgtgcaagtggagatttggagcgctttgaggcctatggtagtaaagggaataccttcatagaaaaactagacagatgcattctcaggaactttttggtgatgtttgtattcaactcccagagttgaactttcctttggaaagagcagctatgaaacactctttttctagaatctgcaagtggacgtttggagggctttgtggtttgtggtggaaaaggaaatatcttcacctaaatactagatagaagcattctcagaagcttctctgagatgactgcattcaactcacggagttgaacactccttttgagagcgcagttttgaaactctctttctgtggcatctgcaaggggacatgtagacctctttgaagatttcgttggaaacggaatcatcttcacataaaaactatacagaagcagtctcagaatcttctttgtgatgtttgcattcaaatccccgagttgaactttcctttcaaagttcacgtttgaaacactctttttgcaggatctacaagtggatatttggaccactctgtgtccttcgttcgaaacgggtatatcttcacatgacatctagacagaagctttctcagaaaattctttgggatgattgagttgaactcacagagctgagcattccttgcgatgtagcagtttagaaacacactttctgcagaatctgcaagtgcatatttggacctctgtgaggaattcgttggaaacgggataatttcagctgactaaacagaagcattctcagaaccttcttcgtgatgtctgcattcaactcacagtgtggaacctttctttgatagttcaggtttgaaacactctttctgtagaaactgcaaggggataattgcactctttgaggagtaccgtagtaaaggaaataacttcctataaaaagaagacagaagcattctcagaaccctcttcgtgatgtttgcattcaacccacagtgctgaaactttctttgatagttcagctttgaaacactctttttgtagaaactgcaagtggatatttggtcctctctgagcatttcgttggaaacgggataaactgcacagaactaaacagaagcattctcagaaccttcttcgtgatgtttgcattcaactcacagtgttgaacctttctttgatagttcaggtttgaaacggtctttctgtagaaactgcaagtagatatttggacctctctgaggatttcgttggaaacgggataacccgcacagaactaaaacagaagcattcacagaaaactcttggtgacgactgagtttaactcacagagctgaacattcctttggatggagcagtttcgaaacacactatttgtagaatgtgcaagtggatatttaggcctctctgaggatttcgttggaaacgggataaaccgcacagaactaaacagaagcattctcagaaactactttgtgatgattgcattcaagtcacagagctgaacattccctttgacggagcagtttggaaactctctttgtgtagaatctacaagtggagatatggaatgctttgaggactatggtagtaaaggaaatagcttcatataaacgctagacagtaacattctcagaaacttctttgtgatgcttgcattcaactcacagagttgaacattcctttcaagagagaagctttgaaacactctttttccagaatctgcaaggggacatttggagggctttgaggcctgtggtggaaaaggaattatcttcccgtaaatgctagatagaagcattgtaagaaacttcttcgtgatgattgcattcaactcacagagttgaaggttccttttcaaacagcagtttccaaacactctttctgtggaatctgcaagtggatatttggacctctttgaagatttcgttggaaacgggagaatcttcacagaaaagctaaacagaagcattctcagaaacttctctgtgatgtttgtgttcaactcccagagtttcacattgcttctcatagagtagttctgaaacatgcttttcatactgtctgcaagtggacatttggagcgctttcaggcctgtggtggaaaacgaattatggtcacataaaaactggagagaagccttctcagaaacttctctgtgatgattgcattcaactcacagagttgaaccctcctatggatagagcagtgttgaaactctctttttgtggaatctgcaagtggatatgtggacccctccgaagatgtctttggaaacgggaatatcttcacataaaaactaaacagaagcattctcagaaactgctttgtgatgattgcattcacctcacagagttgaacattcctgttgatagagcagttcgtaaacactcttgttgcagaatctgcaagtgcatatttggaccactctgtggccttcgttcaaaacgggtacatcttcccataaaatctagacagatgcattctgaggaactttttgttcatgtttgtattcaactcccagagttgaactttcctttggaaagagcagctgtgaaaccctctttttctagaatctgcaagtggacgtttggagggctttgtggtttgtggtggaaaaggaaatatcttcacctaaatactagatagaagcattctcagaagcttctctgtgatgactgcattcaactcacggagttgaacactccttttgagagcgcagttttgaaactctctttctgtggcatctgcaaggggacatgtagacctctttgaagatttcgttggaaacggaatcatcttcacataaaaactatacagaagcagtctcagaatcttctttgtgatgtttgcattcaaatcccagagttgaactttcctttcaaagttcacgtttgaaacactctttttgcaggatctacaagtggatatttggaccactctgtgtccttcgttcgaaacgggtatatcttcacacgacatctagacagaagctttctcagaaaattctttgggatgattgagtggaactcacagagctgaacattccttgcgatggagcagtttagaaacacactttctgcagaatctgcaagtgcatatttggacctctctgaggaattcgttggaaacgggataatttcagctgactaaacagaagcattctcagaaccttcttcgtgatgtctgcattcaactcacagtgtggaacctttctttgatagttcaggtttgaaacactctttttgtagaaactgcaaggggataattgcacttctttgaggcctaccgtagtaaaggaaataacttcctatagaaagaagacagaagcattctcagaaccctcttcgtgatgtttgcattcaactcacagtgctgaacatttctttgatagttcagctttgaaacactctttttgtagaaactgcaagtggatattctggtcctctctgagcatttcgttggaaacgggataaactgcacagaactaaacagaagaattctcagagccctcttcgtgatgtttgcattcaactcacagtgctgaacctttctttgatagtgcagctttgaaacactctttttgtagaaactgcaagtggatatttggtcctctctgaggatttcgttggaaacgggataaaccgcacagaactaaaacagaagcattgtcagaaacttctttgtgatgattgcattcaactcacagagttgaaggttccttttcaaacagcagtttccaatcactctttctgtggaatctgcaagtggatatttgggcctctctgaggatttcgttggaaacgggataaaacgcacagaactaaaacagaagcattctcagaaacttctctgtgatgtttgtgttcaactcccagagtttcacgttgcttttcatagagtagttctgaaacatgcttttcgtagtgtctgcaagtggacatttggagcgctttcaggcctgtggtggaaaacgaattatggtcacataaaaactggagagaagccttctcagaaacttctctgtgatgattgcattcaactcacagagttgaaccctcctatggatagagcagtgttgaaactctctttttgtggaatctgcaagtggatatgtggacctctccgaagatgtctttggaaacgggaatatcttcacataaaaactaaacagaagcattctcagaaacttcttggtgatgtttgcattcaaatcccagagttgaaccttcctttgatagttcaggtttgaaacactctttctgtaggatctgcaagtggctatttggaccactctgtggccttcgttcgaaacgggtatatcttcgcataaaatctagacagaagcattctcagaaaatactttgtgatgattgagtttaaatcacagagctgaccattcctttggatggagcaggtttgagacacactttttgtagaatctacaagtggatatttggacctctctgaggatttcgttggaaacgggataactgcacctaactaaacggaagcattctcagaaactgctttgtgatgattgcattcacctcacagagttgaacattcctattgatagagcagtttggaaacactcttgttgtggaatgtgcaagtggagatttggagcgctttgaggcctgtggtagcaaagggaatagcttcatagaaaaactagacagatgcattctcaggaactttttggtgatgtttgtattcaactcccagagttgaactttcctttggaaagagcagctatgaaacactctttttctagaatctgcaagtggacgtttggagggctttgtggtttgtggtggaaaaggaaatatcttcacctaaatactagatagaagcattctcagaagcttctctgtgatgactgcattcaactcacggagttgaacactccttttgagagcgcagttttgaaactctctttctgtggcatctgcaaggggacatgtagacctctttgaagatttcgttggaaacggaatcatcttcacataaaaactatacagaagcagtctcagaatcttctttgtgatgtttgcattcaaatcccagagttgaactttcctttcaaagttcacgtttgaaacactctttttgcaggatctacaagtggatatttggaccactctgtgtccttcgttcgaaacgggtatatcttcacacgacatctagacagaagctttctcagaaaattctttgggatgattgagtggaactcacagagctgaacattccttgcgatgtagcagtttagaaacacactttctgcagaatctgcaagtgcatatttggacctctctgaggaattcgttggaaacgggataatttcagctgactaaacagaagcattctcagaaccttcttcgtgatgtctgcattcaactcacagtgtggaacctttctttgatagttcaggtttgaaacactctttttgtagaaactgcaaggggataattgcacttctttgaggcctaccgtagtaaaggaaataacttcctatagaaagaagacagaagcattctcagaaccctcttcgtgatgtttgcattcaactcacagtgctgaacctttctttgatagttcagctttgaaacactcttcttgtagaaactgcaagtggatatttggtcctctctgaggatttcgttggaaacgggataaaccgcacagaactaaacagaagaattctcagagccctcttcgtgatgtttgcattcaactcacagtgctgaacctttctttgatagtgcagctttgaaacactctttttgtagaaactgcaagtggatgtttggtcctctctgaggatttcgttggaaacgggataaaccgcacagaactaaaacagaagcattgtcagaaacttctttgtgatgattgcattcaactcacagagttgaaggttccttttcaaacagcagtttccaatcactctttctgtggaatctgcaagtggatatttgggcctctctgaggatttcgttggaaacgggataaaacgcacagaactaaaacagaagcattctcagaaacttctctgtgatgtttgtgttcaactcccagagtttcacgttgcttttcatagagtagttctgaaacatgcttttcgtagtgtctgcaagtggacatttggagcgctttcaggcctgtggtggaaaacgaattatggtcacataaaaactggagagaagccttctcagaaacttctctgtgatgattgcattcaactcacagagttgaaccctcctatggatagagcagtgttgaaactctctttttgtggaatctgcaagtggatatgtggacctctccgaagatgtctttggaaacgggaatatcttcacataaaaactaaacagaagcattctcagaaacttcttggtgatgtttgcattcaaatcccagagttgaaccttcctttgatagttcaggtttgaaacactctttctgtaggatctgcaagtggctatttggaccactctgtggccttcgttcgaaacgggtatatcttcgcataaaatctagacagaagcattctcagaaaatactttgtgatgattgagtttaaatcacagagctgaccattcctttggatggagcaggtttgagacacactttttgtagaatctacaagtggatatttggacctctctgaggatttcgttggaaacgggataactgcacctaactaaacggaagcattctcagaaactgctttgtgatgattgcattcacctcacagagttgaacattcctattgatagagcagtttggaaacactcttgttgtggaatgtgcaagtggagatttggagcgctttgaggcctatggtagtaaagggaatagcttcatagaaaaactagacagatgcattctcaggaactttttggtgatgtttgtattcaactcccagagttgaactttcctttggaaagagcagctatgaaacactctttttctagaatctgcaagtggacgtttggagggctttgtggtttgtggtggaaaaggaaatatcttcacctaaatactagatagaagcattctcagaagcttctctgtgatgactgcattcaactcacggagttgaacactccttttgagagcgcagttttgaaactctctttctgtggcatccgcaaggggacatgtggacctctttgaagatttcgttggaaacggaatcatcttcacataaaaactatacagaagcagtctcagaatcttctttgtgatgtttgcattcaaatcccagagttgaactttcctttcaaagttcacgtttgaaacactctttttgcaggatctacaagtggatatttggaccactctgtgtccttcgttcgaaacgggtatatcttcacacgacatctagacagaagctttctcagaaaattctttgggatgattgagtggaactcacagagctgaacattccttgcgatgtagcagtttagaaacacactttctgcagaatctgcaagtgcatatttggacctctctgaggaattcgttggaaacgggataatttcagctgactaaacagaagcattctcagaaccttcttcgtgatgtctgcattcaactcacagtgtggaacctttctttgatagttcaggtttgaaacactctttttgtagaaactgcaaggggataattgcacttctttgaggcctaccgtagtaaaggaaataacttcctatagaaagaagacagaagcattctcagaaccctcttcgtgatgtttgcattcaactcacagtgctgaacctttctttgatagttcagctttgaaacactcttcttgtagaaactgcaagtggatatttggtcctctctgaggatttcgttggaaacgggataaaccgcacagaactaaacagaagaattctcagagccctcttcgtgatgtttgcattcaactcacagtgctgaacctttctttgatagtgcagctttgaaacactctttttgtagaaactgcaagtggatatttggtcctctctgaggatttcgttggaaacgggataaaccgcacagaactaaaacagaagcattgtcagaaacttctttgtgatgattgcattcaactcacagagttgaaggttccttttcaaacagcagtttccaatcactctttctgtggaatctgcaagtggatatttgggcctctctgaggatttcgttggaaacgggataaaacgcacagaactaaaacagaagcattctcagaaacttctctgtgatgtttgtgttcaactcccagagtttcacgttgcttttcatagagtagttctgaaacatgcttttcgtagtgtctgcaagtggacatttggagcgctttcaggcctgtggtggaaaacgaattatggtcacataaaaactggagagaagccttctcagaaacttctctgtgatgattgcattcaactcacagagttgaaccctcctatggatagagcagtgttgaaactctctttttgtggaatctgcaagtggatatgtggacctctccgaagatgtctttggaaacgggaatatcttcacataaaaactaaacagaagcattctcaggaaacttcttggtgatgtttgcattcaaatcccagagttgaaccttcctttgatagttcaggtttgaaacactctttttgtaggatctgcaagtggctatttggaccactctgtggccttcgttcgaaacgggtatatcttcgcataaaatctagacagaagcattctcagaaaatactttgtgatgattgagtttaaatcacagagctgaccattcctttggatggagcaggtttgagacacactttttgtagaatctacaagtggatatttggacctctctgaggattcgttggaaacgggataactgcacctaactaaacggaagcattctcagaaactgctttgtgatgattgcattcacctcacagagttgaacattcctattgatagagcagtttggaaacactcttgttgtggaatgtgcaagtggagatttggagcgctttgaggcctatggtagtaaagggaatagcttcatagaaaaactagacagatgcattctcaggaactttttggtgatgtttgtattcaactcccagagttgaactttcctttggaaagagcagctatgaaacactctttttctagaatctgcaagtggacgtttggagggctttgtggtttgtggtggaaaaggaaatatcttcacctaaatactagatagaagcattctcagaagcttctctgtgatgactgcattcaactcacggagttgaacactccttttgagagcgcagttttgaaactctctttctgtggcatctgcaaggggacatgtagacctctttgaagatttcgttggaaacggaatcatcttcacataaaaactatacagaagcagtctcagaatcttctttgtgatgtttgcattcaaatcccagagttgaactttcctttcaaagttcacgtttgaaacactctttttgcaggatctacaagtggatatttggaccactctgtgtccttcgttcgaaacgggtatatcttcacacgacatctagacagaagctttctcagaaaattctttgggatgattgagtggaactcacagagctgaacattccttgcgatgtagcagtttagaaacacactttctgcagaatctgcaagtgcatatttggacctctctgaggaattcgttggaaacgggataatttcagctgactaaacagaagcattctcagaaccttcttcgtgatgtctgcattcaactcacagtgtggaacctttctttgatagttcaggtttgaaacactctttttgtagaaactgcaaggggataattgcacttctttgaggcctaccgtagtaaaggaaataacttcctatagaaagaagacagaagcattctcagaaccctcttcgtgatgtttgcattcaactcacagtgctgaacctttctttgatagttcagctttgaaacactcttcttgtagaaactgcaagtggatatttggtcctctctgaggatttcgttggaaacgggataaaccgcacagaactaaacagaagaattctcagagccctcttcgtgatgtttgcattcaactcacagtgctgaacctttctttgatagtgcagctttgaaacactctttttgtagaaactgcaagtggatgtttggtcctctctgaggatttcgttggaaacgggataaaccgcacagaactaaaacagaagcattgtcagaaacttctttgtgatgattgcattcaactcacagagttgaaggttccttttcaaacagcagtttccaatcactctttctgtggaatctgcaagtggatatttgggcctctctgaggatttcgttggaaacgggataaaacgcacagaactaaaacagaagcattctcagaaacttctctgtgatgtttgtgttcaactcccagagtttcacgttgcttttcatagagtagttctgaaacatgcttttcgtagtgtctgcaagtggacatttggagcgctttcaggcctgtggtggaaaacgaattatggtcacataaaaactggagagaagccttctcagaaacttctctgtgatgattgcattcaactcacagagttgaaccctcctatggatagagcagtgttgaaactctctttttgtggaatctgcaagtggatatgtggacctctccgaagatgtctttggaaacgggaatatcttcacataaaaactaaacagaagcattctcagaaacttcttggtgatgtttgcattcaaatcccagagttgaaccttcctttgatagttcaggtttgaaacactctttctgtaggatctgcaagtggctatttggaccactctgtggccttcgttcgaaacgggtatatcttcgcataaaatctagacagagagcattctcagaatatactttgtgatgattgagtttaactcacagagctgaacattcctttggatggagcaggtttgagacacactttttgtagaatctacaagtggatatttggacctctctgaggatttcgttggaaacgggataactgcacctaactaaacggagcattctcagaaactgctttgtgatgattgcattcacctcacagagttgaacattcctattgatagagcagtttggaaacactcttgttgtggaatgtgcaagtggagatttggagcgctttgaggcctatggtagtaaagggaatagcttcatagtaaaactagacagatgcattctcaggaactttttggtgatgtttgtattcaactcccagagttgaactttcctttggaaagagcagctatgaaacactctttttctagaatctgcaagtggacgtttgcagggctttgtggtttgtggtggaaaaggaaatatcttcacctaaatactagatagaagcattctcagaagcttctctgtgatgactgcattcaactcacggagttgaacactccttttgagagcgcagttttgaaactctctttctgtggcatctgcaaggggacatgtagacctctttgaagatttcgttggaaacggaatcatcttcacataaaaactatacagaagcagtctcagaatcttctttgtgatgtttgcattcaaatccccgagttgaactttcctttcaaagttcacgtttgaaacactctttttgcaggatctacaagtggatatttggaccactctgtgtccttcgttcgaaacgggtatatcttcacatgacatctagacagaagctttctcagaaaattctttgggatgattgagttgaactcacagagctgagcattccttgcgatgtagcagtttagaaacacactttctgcagaatctgcaagtgcatatttggacctctgtgaggaattcgttggaaacgggataatttcagctgactaaacagaagcattctcagaaccttcttcgtgatgtctgcattcaactcacagtgtggaacctttctttgatagttcaggtttgaaacactctttctgtagaaactgcaaggggataattgcactctttgaggagtaccgtagtaaaggaaataacttcctataaaaagaagacagaagcattctcagaaccctcttcgtgatgtttgcattcaactcacagtgctgaacctttctttgatagttcagctttgaaacactctttttgtagaaactgcaagtggatatttggtcctctctgaggatttcgttggaaacgggataaactgcacagaactaaacagaagcattctcagaaccttcttcgtgatgtttgcattcaactcacagtgttgaacctttctttgatagttcaggtttgaaacggtctttctgtagaaactgcaagtagatatttggacctctctgaggatttcgttggaaacgggataacccgcacagaactaaaacagaagcattcacagaaaactcttggtgacgactgagtttaactcacagagctgaacattcctttggatggagcagtttcgaaacacactatttgtaggatgtgcaagtggatatttgggcctctctgaggatttcgttggaaacgggataaaccgcacagaactaaacagaagcattctcagaaactactttgtgatgattgcattcaagtcacagagttgaacattccctttgacagagcagtttggaaactctctttgtgtagaatctgcaagtggagatatggaccgctttgaggcctatggtagtaaaggaaatagcttcatataaaagctagacagtagcattctcagaaacttctttgtgatgcttgcattcaactcacagagttgaactttcctttcgagagagaagctttgaaacactctttttccagaatctgcaagtggacatttggagggctttgaggcctgtggtggaaaaggaattatcttcccgtaaaagctagatagaagcattgtcagaaacttctttgtgatgattgcattcaactcacagagttgaaggttccttttcaaagagcagtttccaatcactctttctgtggaatctgcaagtggatatttggacctattttgaagatttcattggaaacgggagaatcttcacaggaaagctaaacagaagcattctcagaaacttctctgtgatgtttgtgttcaactcccagagtttcacgttgcttttcatagagtagttctgaaacatgcttttcgtagtgtctgcaagtggacatttggagcgctttcaggcctgtggtggaaaacgaattatggtcacataaaaactggagagaagccttctcagaaacttctctgtgatgattgcattcaactcacagagttgaaccctcctatggatagagcagtgttgaaactctctttttgtggaatctgcaagtggatatgtggacctctccgaagatgtctttggaaacgggaatatcttcacataaaaactaaacagaagcattctcagaaacttcttggtgatgtttgcattcaaatcccagagttgaaccttcctttgatagttcaggtttgaaacactctttctgtaggatctgcaagtggctatttggaccactctgtggccttcgttcgaaacgggtatatcttcgcataaaatctagacagaagcattctcagaaaatactttgtgatgattgagtttaaatcacagagctgaccattcctttggatggagcaggtttgagacacactttttgtagaatctacaagtggatatttggacctctctgaggatttcgttggaaacgggataactgcacctaactaaacggaagcattctcagaaactgctttgtgatgattgcattcacctcacagagttgaacattcctattgatagagcagtttggaaacactcttgttgtggaatgtgcaagtggagatttggagcgctttgaggtctatggtagtaaagggaatagcttcatagaaaaactagacagatgcattctcaggaactttttggtgatgtttgtattcaactcccagagttgaactttcctttggaaagagcagctatgaaacactctttttctagaatctgcaagtggacgtttggagggctttgtggtttgtggtggaaaaggaaatatcttcacctaaatactagacagaagcattctcagaagcttctctgtgatgactgcattcaactcacggagttgaacactccttttgagagcgcagttttgaaactctctttctgtggcatctgcaaggggacatgtagacctctttgaagatttcgttggaaacggaatcatcttcacataaaaactatacagaagcagtctcagaatcttctttgtgatgtttgcattcaaatcccagagttgaactttcctttcaaagttcacgtttgaaacactctttttgcaggatctacaagtggatatttggaccactctgtgtccttcgttcgaaacgggtatatcttcacatgacatctagacagaagctttctcagaaaattctttgggatgattgagtggaactcacagagctgaacattccttgcgatgtagcagtttagaaacacactttctgcagaatctgcaagtgcatatttggacctctctgaggaattcgttggaaacgggataatttcagctgactaaacagaagcattctcagaaccttcttcgtgatgtctgcattcaactcacagtgtggaacctttctttgatagttcaggtttgaaacactctttttgtagaaactgcaaggggataattgcacttctttgaggcctaccgtagtaaaggaaataacttcctatagaaagaagacagaagcattctcagaaccctcttcgtgatgtttgcattcaactcacagtgctgaacctttctttgatagttcagctttgaaacactcttcttgtagaaactgcaagtggatatttggtcctctctgaggatttcgttggaaacgggataaaccgcacagaactaaacagaagaattctcagagccctcttcgtgatgtttgcattcaactcacagtgctgaacctttctttgatagtgcagctttgaaacactctttttgtagaaactgcaagtggatgtttggtcctctctgaggatttcgttggaaacgggataaaccgcacagaactaaaacagaagcattgtcagaaacttctttgtgatgattgcattcaactcacagagttgaaggttccttttcaaacagcagtttccaatcactctttctgtggaatctgcaagtggatatttgggcctctctgaggatttcgttggaaacgggataaaacgcacagaactaaaacagaagcattctcagaaacttctctgtgatgtttgtgttcaactcccagagtttcacgttgcttttcatagagtagttctgaaacatgcttttcgtagtgtctgcaagtggacatttggagcgctttcaggcctgtggtggaaaacgaattatggtcacataaaaactggagagaagccttctcagaaacttctctgtgatgattgcattcaactcacagagttgaaccctcctatggatagagcagtgttgaaactctctttttgtggaatctgcaagtggatatgtggacctctccgaagatgtctttggaaacgggaatatcttcacataaaaactaaacagaagcattctcagaaacttcttggtgatgtttgcattcaaatcccagacttgaaccttcctttgatagttcaggtttgaaacactctttttgtaggatctgcaagtggctatttggaccactctgtggccttcgttcgaaacgggtatatcttcgcataaaatctagacagaagcattctcagaaaatactttgtgatgattgagtttaactcacagagctgaacattcctttggatggagcaggtttgagacacactttttgtagaatctacaagtggatatttggacctctctgaggatttcgttggaaacgggataactgcacctaactaaacggaagcattctcagaaactgctttgtgatgattgcattcacctcacagagttgaccattcctattgatagagcagtttggaaaccctcttgttgtggaatgtgcaagtggagatttggagcgctttgaggcctatggtagtaaaggaaatagcttcatagaaaaactagacagatgcattctcaggaactttttggtgatgtttgtattcaactcccagagttgaactttcctttggaaagagcagctatgaaacactctttttctagaatctgcaagtggacgtttggagggctttgtggtttgtggtggaaaaggaaatatcttcacctaaatactagatagaagcattctcagaagcttctctgtgatgactgcattcaactcacggagttgaacactccttttgagagcgcagttttgaaactctgtttctgtggcatctgcaaggggacatgtagacctctttgaagatttcgttggaaacggaatcatcttcacataaaaactatacagaagcagtctcagaatcttctttgtgatgtttgcattcaaatcccagagttgaactttcctttcaaagttcacgtttgaaacactctttttgcaggatctacaagtggatatttggaccactctgtgtccttcgttcgaaacgggtatatcttcacatgacatctagacagaagctttctcagaaaattctttgggatgattgagtggaactcacagagctgaacattccttgcgatggagcagtttagaaacacactttctgcagaatctgcaagtgcatatttggacctctctgaggaattcgttggaaacgggataatttcagctgactaaacagaagcattctcagaaccttcttcgtgatgtctgcattcaactcacagtgtggaacctttctttgatagttcaggtttgaaacactctttttgtagaaactgcaaggggataattgcacttctttgaggcctaccgtagtaaaggaaataacttcctatagaaagaagacagaagcattctcagaaccctcttcgtgatgtttgcattcaactcacagtgctgaacctttctttgatagttcagctttgaaacactcttcttgtagaaactgcaagtggatatttggtcctctctgaggatttcgttggaaacgggataaaccgcacagaactaaacagaagaattctcagagccctcttcgtgatgtttgcattcaactcacagtgctgaacctttctttgatagtgcagctttgaaacactctttttgtagaaactgcaagtggatgtttggtcctctctgaggatttcgttggaaacgggataaaccgcacagaactaaaacagaagcattgtcagaaacttctttgtgatgattgcattcaactcacagagttgaaggttccttttcaaacagcagtttccaatcactctttctgtggaatctgcaagtggatatttgggcctctctgaggatttcgttggaaacgggataaaacgcacagaactaaaacagaagcattctcagaaacttctctgtgatgtttgtgttcaactcccagagtttcacgttgcttttcatagagtagttctgaaacatgcttttcgtagtgtctgcaagtggacatttggagcgctttcaggcctgtggtggaaaacgaattatggtcacataaaaactggagagaagccttctcagaaacttctctgtgatgattgcattcaactcacagagttgaaccctcctatggatagagcagtgttgaaactctctttttgtggaatctgcaagtggatatgtggacctctccgaagatgtctttggaaacgggaatatcttcacataaaaactaaacagaagcattctcagaaacttcttggtgatgtttgcattcaaatcccagagttgaaccttcctttgatagttcaggtttgaaacactctttctgtaggatctgcaagtggctatttggaccactctgtggccttcgttcgaaacgggtatatcttcgcataaaatctagacagaagcattctcagaaaatactttgtgatgattgagtttaaatcacagagctgaccattcctttggatggagcaggtttgagacacactttttgtagaatctacaagtggatatttggacctctctgaggatttcgttggaaacgggataactgcacctaactaaacggaagcattctcagaaactgctttgtgatgattgcattcacctcacagagttgaacattcctattgatagagcagtttggaaacactcttgttgtggaatgtgcaagtggagatttggagcgctttgaggcctgtggtagtaaagggaatagcttcatagaaaaactagacagatgcattctcaggaactttttggtgatgtttgtattcaactcccagagttgaactttcctttggaaagagcagctatgaaacactctttttctagaatctgcaagtggacgtttggagggctttgtggtttgtggtggaaaaggaaatatcttcacctaaatactagatagaagcattctcagaagcttctctgtgatgactgcattcaactcacggagttgaacactccttttgagagcgcagttttgaaactctctttctgtggcatctgcaaggggacatgtagacctctttgaagatttcgttggaaacggaatcatcttcacataaaaactatacagaagcagtctcagaatcttctttgtgatgtttgcattcaaatcccagagttgaactttcctttcaaagttcacgtttgaaacactctttttgcaggatctacaagtggatatttggaccactctgtgtccttcgttcgaaacgggtatatcttcacacgacatctagacagaagctttctcagaaaattctttgggatgattgagtggaactcacagagctgaacattccttgcgatgtagcagtttagaaacacactttctgcagaatctgcaagtgcatatttggacctctctgaggaattcgttggaaacgggataatttcagctgactaaacagaagcattctcagaaccttcttcgtgatgtctgcattcaactcacagtgtggaacctttctttgatagttcaggtttgaaacactctttttgtagaaactgcaaggggataattgcacttctttgaggcctaccgtagtaaaggaaataacttcctatagaaagaagacagaagcattctcagaaccctcttcgtgatgtttgcattcaactcacagtgctgaacctttctttgatagttcagctttgaaacactcttcttgtagaaactgcaagtggatatttggtcctctctgaggatttcgttggaaacgggataaaccgcacagaactaaacagaagaattctcagagccctcttcgtgatgtttgcattcaactcacagtgctgaacctttctttgatagtgcagctttgaaacactctttttgtagaaactgcaagtggatgtttggtcctctctgaggatttcgttggaaacgggataaaccgcacagaactaaaacagaagcattgtcagaaacttctttgtgatgattgcattcaactcacagagttgaaggttccttttcaaacagcagtttccaatcactctttctgtggaatctgcaagtggatatttgggcctctctgaggatttcgttggaaacgggataaaacgcacagaactaaaacagaagcattctcagaaacttctctgtgatgtttgtgttcaactcccagagtttcacgttgcttttcatagagtagttctgaaacatgcttttcgtagtgtctgcaagtggacatttggagcgctttcaggcctgtggtggaaaacgaattatggtcacataaaaactggagagaagccttctcagaaacttctctgtgatgattgcattcaactcacagagttgaaccctcctatggatagagcagtgttgaaactctctttttgtggaatctgcaattggatatgtggacctctccgaagatgtctttggaaacgggaatatcttcacataaaaactaaacagaagcattctcagaaacttcttggtgatgtttgcattcaaatcccagagttgaaccttcctttgatagttcaggtttgaaacactctttttgtaggatctgcaagtggctatttggaccactctgtggccttcgttcgaaacgggtatatcttcgcataaaatctagacagaagcattctcagaaaatactttgtgatgattgagtttaaatcacagagctgaccattcctttggatggagcaggtttgagacacactttttgtagaatctacaagtggatatttggacctctctgaggatttcgttggaaacgggataactgcacctaactaaacggaagcattctcagaaactgctttgtgatgattgcattcacctcacagagttgaacattctctattgatagagcagtttggaaacactcttgttgtggaatgtgcaagtggagatttggagcgctttgaggcctatggtagtaaagggaatagcttcatagaaaaactagacagatgcattctcaggaactttttggtgatgtttgtattcaactcccagagttgaactttcctttggaaagagcagctatgaaacactctttttctagaatctgcaagtggacgtttggagggctttgtggtttgtggtggaaaaggaaatatcttcacctaaatactagatagaagcattctcagaagcttctctgtgatgactgcattcaactcacggagttgaacactccttttgagagcgcagttttgaaactctctttctgtggcatctgcaaggggacatgtagacctctttgaagatttcgttggaaacggaatcatcttcacatcaaaactatacagaagcagtctcagaatcttctttgtgatgtttgcattcaaatcccagagttgaactttcctttcaaagttcacgtttgaaacactctttttgcaggatctacaagtggatatttggaccactctgtgtccttcgttcgaaacgggtatatcttcacatgacatctagacagaagctttctcagaaaattctttgcgatgattgagttgaactcacagagctgaacattccttgcgatgtagcagtttagaaacacactttctgcagaatctgcaagtgcatatttggacctctctgaggaattcgttggaaacgggataatttcagctgactaaacagaagcattctcagaaccttcttcgtgatgtctgcattcaactcacagtgtggaacctttctttgatagttcaggtttgaaacactctttttgtagaaactgcaaggggataattgcacttctttgaggcctaccgtagtaaaggaaataacttcctataaaaagaagacagaagcattctcagaaccctcttcgtgatgtttgcattcaactcacagtgctgaacctttctttgatagttcagctttgaaacactcttcttgtagaaactgcaagtggatatttggtcctctctgaggatttcgttggaaacgggataaaccgcacagaactaaacagaagaattctcagagccctcttcgtgatgtttgcattcaactcacagtgctgaacctttctttgatagtgcagctttgaaacactctttttgtagaaactgcaagtggatatttggtcctctctgaggattttgttggaaacgggataaaccgcacagaactaaaacagaagcattcacagaaaactcttggtgacgactgagtttaactcacagagctgaacattcctttggatggagcagtttcgaaacacactatttgtagaatctgcaagtggatatttgggcctctctgaggatttcgttggaaacgggataaaacgcacagaactaaaacagaagcattctcagaaactactttgtgatgattgcattcaagtcacagagttgaacattccctttgacagagcagtttggaaactctctttgtgtagaatctgcaagtggagatatggaccgctttgaggcctatggtagtaaaggaaatagcttcatataaaagctagacagtagcattctcagaaacttctttgtgatgcttgcattcaactcacagagttgaactttcctttcgagagagaagctttgaaacactctttttccagaatgtgcaagtggacatttggggagctttgaggcctgtggtggaaaaggaattatcttcccgtaaaagctagatagaagcattgtcagaaacttctttgtgatgattgcattcaactcacagagttgaaggttccttttcaaacaacagtttccaatcactctttctgtggaatctgcaagtggatatttcgacctctttgaagatttcgttggaaacgggagaatcttcacagaaaagctaaacagaagcattctcagaaacttctctgtgatgtttgtgttcaactcccagagtttcacgttgcttttcatagagtagttctgaaacatgcttttcgtagtgtctgcaagtggacatttggagcgctttcaggcctgtggtggaaaacgaattatggtcacataaaaactggagagaagccttctcagaaacttctctgtgatgattgcattcaactcacagagttgaaccctcctatggatagagcagtgttgaaactctctttttgtggaatctgcaagtggatatgtggacctctccgaagatgtctttggaaacgggaatatcttcacataaaaactaaacagaagcattctcagaaaacttcttggtgatgtttgcattcaaatcccagagttgaaccttcctttgatagttcaggtttgaaacactctttctgtaggatctgcaagtggctatttggaccactctgtggccttcgttcgaaacgggtatatcttcgcataaaatctagacagaagcattctcagaaaatactttgtgatgattgagtttaaatcacagagctgaccattcctttggatggagcaggtttgagacacactttttgtagaatctacaagtggatatttggacctctctgaggatttcgttggaaacgggataactgcacctaactaaacggaagcattctcagaaactgctttgtgatgattgcattcacctcacagagttgaacattcctattgatagagcagtttggaaacactcttgttgtggaatgtgcaagtggagatttggagcgctttgaggcctatggtagtaaagggaatagcttcatagaaaaactagacagatgcattctcaggaactttttggtgatgtttgtattcaactcccagagttgaactttcctttggaaagagcagctatgaaacactctttttctagaatctgcaagtggacgtttggagggctttgtggtttgtggtggaaaaggaaatatcttcacctaaatactagacagaagcattctcagaagcttctctgtgatgactgcattcaactcacggagttgaacactccttttgagagcgcagttttgaaactctctttctgtggcatctgcaaggggacatgtagacctctttgaagatttcgttggaaacggaatcatcttcacataaaaactatacagaagcagtctcagaatcttctttgtgatgtttgcattcaaatcccagagttgaactttcctttcaaagttcacgtttgaaacactctttttgcaggatctacaagtggatatttggaccactctgtgtccttcgttcgaaacgggtatatcttcacacgacatctagacagaagcttcctcagaaaattctttgggatgattgagttgagcaaacagagctgaacactccttgcgatgtagcagtttagaaacacactttctgcagaatctgcaagtgcatatgtggacctccctgaggaattcgttggaaacgggataatttcagctgactaaacagaagcattctcagaaccttcttcgtgatgtctgcattcaactcatagtgtggaacctttctctgatagttcaggtttgaaacactctttttgtagaaactgcaaggggataattgcacttctttgaggcctactgtagtaaaggaaataacttcctatagaaagaagacagaagcattctcagaaccctcttcgtgatgtttgcattcaactcacagtgctgaaactttctttgatagttcagctttgaaacactcttcttggagaaactgcaagtggatatttggtcctctctgaggatttcgttggaaacgtgataaaccgcacagaactaaacagaagcattctcagaaccttcttcgtgatgtttgcattcaactcacagtgttgaacctttctttgatagttcaggtttgaaacggtctttctgtagaaactgcaagtagatatttggacctctctgaggatttcgttggaaacgggataaaccgcacagaactaaaacagaagcattcacagaaaactcttgctgacgactgagtttaactcacagagctgaacattcctttagatggagcagtttcgaaacacactatttgtagaatgtgcaagtggatatttgggcctctctgaggatttcgttggaaacgggataaaccgcacagaactaaacagaagcattctcagaaactgctttgtgatgattgcattcacctcacagagttgaacattcctattgatagaggagtttggaaactctctttgtgtagaatctgcaagtggagatatggaatgctttgaggactatggtagtaaaggaaatagcttcatataaaagctagacagtagcattctcagaaacttctttgtgatgcttgcattcaactcacagagttgaactttcctttcgagagagaagctttgaaacactctttttccagaatctgcaagtggacatttggagggctttgaggcctgtggtggaaaaggaattaacttcccgtaaaagctagatagaagcattgtcagaaacttctttgtgatgattgcattcaactcacagagttgaaggttccttttcaaagagcagtttccaatcactctttctgtggaatctgcaagtggatatttggacctctttgaagatttcgttggaaacgggagaatcttcacagaaaagctaaacagaagcattctcagaaacttctctgtgatgtttgtgttcaactcccagagtttcacattgcttttcatagagtagttctgaaacatgcttttcgtagtgtctgcaagtggacatttggagcgctttcaggcctgtggtggaaaacgaattatggtcacataaaaactggagagaagccttctcagaaacttctctgtgatgattgcattcaactcacagagttgaaccctcctatggatagagcagtgttgaaacgctctttttgtggaatctgcaagtggatatgtggacctctccgaagatgtctttggaaacgggaatatcttcacataaaaactaaacggaagcattctcagaaacttcttggtgatgtttgcattcaaatcccagagttgaaccttcctttgatagttcaggtttgaaacactctttttgtaggatctgcaagtggatatttggaccactctgtggccttcgttcgaaacgggtacatcttcgcataaaatctagacagaagcattctcagaaaatactttgtgatgattgagtttaactcacagagctgaacattcctttggatggagcacgtttgagacacactttttgtagaatctacaagtggatatttggacctctctgaggatttcgttggaaacgggataactgcacctaactaaacggaagcattctcagaaactgctttgtgatgattgcattcacctcacagagttgaacattcgtattgatagagcagtttggaaacactcttcttgtggaatgtgcaagtggagatttggagcgctttggggcctatggtagtaaagggaatagcttcatagaaaaactagacagatgcattctcaggaactttttggtgatgtttgtattcaactcccagagttgaactttcctttggaaagagcagctatgaaacactctttttctagaatctgcaagtggacgtttggagggctttgtggtttgtggtggaaaaggaaatatcttcacctaaatactagagagaagcattctcagaagcttctctgtgatgactgcattcaactcacggagttgaacactccttttgagagcgcagttttgaaactctctttctgtggcatctgcaaggggacatgtagacctctttgaagatttcgttggaaacggaatcatcttcacataaaaactatacagaagcagtctcagaatcttctttgtgatgtttgcattcaaatcccagagttgaactttcctttcaaagttcacgtttgaaacactctttttgcaggatctacaagtggatatttggaccactctgtgtccttcgttcgaaacgggtatatcttcacatgacatctagacagaagctttctcagaaaattctttgtgatgattgagttgagcaaacagagctgaacactccttgcgatgtagcagtttagaaacacactttctgcagaatctgcaagtgcatatgtggacctctctgaggaattcgttggaaacgggataatttcagctgactaaacagaagcattctcagaaccttcttcgtgatgtctgcattcaactcacagtgtggaacctttctttgatagttcaggtttgaatcactctttttgtagaaactgcaaggggatcattgcacttctttgaggcctaccgtagtaaaggaaataacttcctataaaaagaagacagaagcattctcagaaccctcttcgtgatgtttgcattcaactcacggtgctgaacctttctttgatagttcagctttgaaacactctttttgtagaaactgcaagtggatatttggtcctctctgaggatttcgttggaaacgggataaaccgcacagaactaaacagaagcattctcagaaccttcttcgtgatgtttgcattcaactcacagtgttgaacctttctttgatagttcaggtttgaaacggtctttctgtagaaactgcaagtagatatttggacctctctgaggatttcgttggaaacgggataaaccgcacagaactacaacagaagcattcacagaaaactcttggtgacgactgagtttaactcacagagctgaacattcctttggatggagcagtttcgaaacacactatttgtagaatctgcaagtggatatttgggcctctctgaggatttcgttggaaacgggataaaccgcacagaagtaaacagaagcattctcagaaactactttgtgatgattgcattcaagtcacagagttgaacattccctttgacagagcagtttggaaactctctttgtgtagaatctgcaagtggagatatggaccgctttgaggcctatggtagtaaaggaaatagcttcatataaaagctagacagtagcattctcagaaacttctttgtgatgcttgcattcaactcacagagttgaactttcctttcgagagagaagctttgaaacactctttttccagaatctgcaagtggacatttggagggctttgaggcctgtggtggaaaaggaattatcttcccgtaaaagctagatagaagcattgtcagaaacttctttgtgatgattgcattcaactcacagagttgaaggttccttttcaaagagcagtttccaatcactctttctgtggaatctgcaagtggatatttggacctattttgaagatttcgttggaaacgggagaatcttcacaggaaagctaaacagaagcattctcagaaacttctctgtgatgtttgtgttcaactcccagagtttcacattgcttttcatagagtagttctgaaacatgcttttcgtagtgtctacaagtggacatttggagcgctttcaggcctgtggtggaaaacgaattatggtcacataaaaactggagagaagccttctcagaaacttctctgtgatgattgcattcaactcacagagttgaaccctcctatggatagagcagtgttgaaactctctttttgtggaatctgcaagtggatatgtggacctctccgaagatgtctttggaaacgggaatatcttcacataaaaactaaacagaagcattctcagaaacttcttggtgatgtttgcattcaaatcccagagttgaaccttcctttgatagttcaggtttgaaacactctttttgtaggatctgcaagtggatatttggaccactctgtggccttcgttcgaaacgggtacatcttcgcataaaatctagacagaagcattctcagaaaatactttgtgatgattgagtttaactcacagagctgaacattcctttggatggagcaggtttgagacacaccttttgtagaatctacaagtggatatttggacctctctgaggatttcgttggaaacgggataactgcacctaactaaacggaagcattctcagaaactgctttgtgatgattgcattcacctcacagagttgaacattcctattgatagagcagtttggaaacactcttgttgtggaatgtgcaagtggagatttggagcgctttgaggcctatggtagtaaagggaatagcttcatagaaaaactagacagatgcattctcaggaactttttggtgatgtttgtattcaactcccagagttgaactttcctttggaaagagcagctatgaaacactctttttctagaatctgcaagtggacgtttggagggctttgtggtttgtggtggaaaaggaaatatcttcacctaaatactagatagaagcattctcagaagcttctctgtgatgactgcattcaactcacggagttgaacactccttttgagagcgcagttttgaaactctctttctgtggcatctgcaaggggacatgtagacctctttgaagatttcgttggaaacggaatcatcttcacataaaaactatacagaagcagtctcagaatcttctttgtgatgtttgcattcaaatcccagagttgaactttcctttcaaagttcacgtttgaaacactctttttgcaggatctacaagtggatatttggaccactctgtgtccttcgttcgaaacgggtatatcttcacacgacatctagacagaagctttctcagaaaattctttgggatgattgagtggaactcacagagctgaacattccttgcgatgtagcagtttagaaacacactttctgcagaatctgcaagtgcatatttggacctctctgaggaattcgttggaaacgggataatttcagctgactaaacagaagcattctcagaaccttcttcgtgatgtctgcattcaactcacagtgtggaacctttctttgatagttcaggtttgaaacactctttttgtagaaactgcaaggggataattgcacttctttgaggcctaccgtagtaaaggaaataacttcctatagaaagaagacagaagcattctcagaaccctcttcgtgatgtttgcattcaactcacaagtgctgaacctttctttgatagttcagctttgaaacactcttcttgtagaaactgcaagtggatatttggtcctctctgaggatttcgttggaaacgggataaaccgcacagaactaaacagaagcgttctcagaaccctcttcgtgatgtttgcattcaactcacagtgctgaacctttctttgatagtgcagctttgaaacactctttttgtagaaactgcaagtggatatttggtcctctctgaggatttcgttggaaacgggataaaccgcacggaactaaaacggaagcattctcagaaccttcttcgtgatgtttgcattcaactcacagtgtggaacctttctttgatagttcaggtttgaaacggtctttctgtagaaactgcaagtagatatttggacctctctgaggatttcgttggaaacgggataacccgcacagaactaaaacagaagcattcacagaaaactcttggtgacgactgagtttaactcacagagctgaacattcctttggatggagcagattcgaaacacactatttgtagaatgtgcaagtggatatttgggcctctctgaggatttcgttggaaacgggataaaccgcacagaactaaacagaagcattctcagaaactactttgtgatgattgcattcaagtcacagagttgaacattccctttgacagagcagtttggaaactctctttgtgtagaatctggaagtggagatatggaccgctttgaggcctatggtagtaaaggaaatagcttcatataaaagctagacagtagcattctcagaaacttctttgtgatgcttgcattcaactcacagagttgaactttcctttcgagagagaagctttgaaacactctttttccagaatgtgcaagtggacatttggggagctttgaggcctgtggtggaaaaggaattatcttcccgtaaaagctagatagaagcattgtcagaaacttctttgtgatgactgcattcaactcacagagttgaaggttccttttcaaacagcagtttccaatcactctttctgtggaatctgcaagtggatatttcgacctctttgaagatttcgttggaaacgggagaatcttcacagaaaagctaaacagaagcattctcagaaacttctctgtgatgtttgtgttcaactcccagagtttcacgttgcttttcatagagtagttctgaaacatgcttttcgtagtgtctgcaagtggacatttggagcgctttcaggcctgtggtggaaaacgaattatggtcacataaaaactggagagaagccttctcagaaacttctctgtgatgattgcattcaactcacagagttgaaccctcctatggatagagcagtgttgaaactctctttttgtggaatctgcaagtggatatgtggacctctccgaagatgtctttggaaacgggaatatcttcacataaaaactaaacagaagcattctcagaaacttcttggtgatgtttgcattcaaatcccagagttgaaccttcctttgatagttcaggtttgaaacactctttctgtaggatctgcaagtggctatttggaccactctgtggccttcgttcgaaacgggtatatcttcgcataaaatctagacagaagcattctcagaaaatactttgtgatgattgagtttaaatcacagagctgaccattcctttggatggagcaggtttgagacacactttttgtagaatctacaagtggatatttggacctctctgaggatttcgttggaaacgggataactgcacctaactaaacggaagcattctcagaaactgctttgtgatgattgcattcacctcacagagttgaacattcctattgatagagcagtttggaaacactcttgttgtggaatgtgcaagtggagatttggagcgctttgaggcctatggtagtaaagggaatagcttcatagaaaaactagacagatgcattctcaggaaccttttggtgatgtttgtattcaactcccagagttgaactttcctttggaaagagcagctatgaaacactctttttctagaatctgcaagtggacgtttggagggctttgtggtttgtggtggaaaaggaaatatcttcacctaaatactagatagaagcattctcagaagcttctctgtgatgactgcattcaactcacggagttgaacactccttttgagagcgcagttttgaaactctctttctgtggcatctgcaaggggacatgtagacctctttgaagatttcgttggaaacggaatcatcttcacataaaaactatacagaagcagtctcagaaacttctttgtgatgtttgcattcaaatcccagagttgaactttcctttcaaagttcacgtttgaaacactctttttgcaggatctacaagtggatatttggaccactctgtgtccttcgttcgaaacgggtatatcttcacacgacatctagacagaagctttctcagaaaattctttgggatgattgagtggaactcacagagctgagcattccttgcgatgtagcagtttagaaacacactttctgcagaatctgcaagtgcatatttggacctctctgaggaattcgttggaaacgggataatttcagctgactaaacagaagcattctcagaaccttcttcgtgatgtctgcattcaactcacagtgtggaacctttctttgatagttcaggtttgaaacactctttttgtagaaactgcaaggggataattgcacttctttgaggcctaccgtagtaaaggaaataacttcctatagaaagaagacagaagcattctcagaaccctcttcgtgatgtttgcattcaactcacagtgctgaacctttctttgatagttcagctttgaaacactcttcttgtagaaactgcaagtggatatttggtcctctctgaggatttcgttggaaacgggataaaccgcacagaactaaacagaagaattctcagagccctcttcgtgatgtttgcattcaactcacagtgctgaacctttctttgatagtgcagctttgaaacactctttttgtagaaactgcaagtggatgtttggtcctctctgaggatttcgttggaaacgggataaaccgcacagaactaaaacagaagcattgtcagaaacttctttgtgatgattgcattcaactcacagagttgaaggttccttttcaaacagcagtttccaatcactctttctgtggaatctgcaagtggatatttgggcctctctgaggatttcgttggaaacgggataaaacgcacagaactaaaacagaagcattctcagaaacttctctgtgatgtttgtgttcaactcccagagtttcacgttgcttttcatagagtagttctgaaacatgcttttcgtagtgtctgcaagtggacatttggagcgctttcaggcctgtggtggaaaacgaattatggtcacataaaaactggagagaagccttctcagaaacttctctgtgatgattgcattcaactcacagagttgaaccctcctatggatagagcagtgttgaaactctctttttgtggaatctgcaagtggatatgtggacctctccgaagatgtctttggaaacgggaatatcttcacataaaaactaaacagacattctcagaaacttcttggtgatgtttgcattcaaatcccagagttgaaccttcctttgatagttcaggtttgaaacactctttctgtaggatctgcaagtggctatttggaccactctgtggccttcgttcgaaacgggtatatcttcgcataaaatctagacagaagcactctcagaaaatactttgtgatgattgagtttaactcacagagctgaacgttcctttggatggagcaggtttgagacacacatttgtagaatctacaagtggatatttggacctctctgaggatttcgttggaaacgcgataactgcacctaactaaacggaagcattctcagaaactgctttgtgatgattgcattcacctcacagagttgaacattcctattgatagagcagtttggaaacactcttgttgtggaatgtgcaagtggagatttggagcgctttgaggcctatggtagtaaagggaatagcttcatagaaaaactagacagatgcattctcaggaactttttggtgatgtttgtattcaactcccagagttgaactttcctttggaaagagcagctatgaaacactctttttctagaatctgcaagtggacgtttggagggctttgtggtttgtggtggaaaaggaaatatcttcacctaaatactagatagaagcattctcagaagcttctctgtgatgactgcattcaactcacgggagttgaacactccttttgagagcacagttttgaaactctctttctgtggcatctgcaaggggacatgtagacctctttgaagatttcgttggaaacggaatcatcttcacataaaatctatacagaagcagtctcagaatcttctttgtgatgtttgcattcaaatcccagagttgaactttcctttcaaagttcacgtttgaaacactctttttgcaggatctacaagtggatatttggaccactctgtgtccttcgttcgaaacgggtatatcttcacacgacatgctagacagaagctttctcagaaaattctttgggatgattgagtggaactcacagagctgaacattccttgcgatgtagcagtttagaaacacactttctgcagaatctgcaagtgcatatttggacctctctgaggaattcgttggaaacgggataatttcagctgactaaacagaagcattctcagaaccttcttcgtgatgtctgcattcaactcacagtgtggaacctttctttgatagttcaggtttgaaacactctttttgtagaaactgcaaggggataattgcacttctttgaggcctaccgtagtaaaggaaataacttcctatagaaagaagacagaagcattctcagaaccctcttcgtgatgtttgcattcaactcacagtgctgaacctttctttgatagttcagctttgaaacactcttcttgtagaaactgcaagtggatatttggtcctctctgaggatttcgttggaaacgggataaaccgcacagaactaaacagaagaattctcagagccctcttcgtgatgtttgcattcaactcacagtgctgaacctttctttgatagtgcagctttgaaacactctttttgtagaaactgcaagtggatgtttggtcctctctgaggatttcgttggaaacgggataaaccgcacagaactaaaacagaagcattgtcagaaacttctttgtgatgattgcattcaactcacagagttgaaggttccttttcaaacagcagtttccaatcactctttctgtggaatctgcaagtggatatttgggcctctctgaggatttcgttggaaacgggataaaacgcacagaactaaaacagaagcattctcagaaacttctctgtgatgtttgtgttcaactcccagagtttcacgttgcttttcatagagtagttctgaaacatgcttttcgtagtgtctgcaagtggacatttggagcgctttcaggcctgtggtggaaaacgaattatggtcacataaaaactggagagataagccttctcagaaacttctctgtgatgattgcattcaactcacagagttgaaccctcctatggatagagcagtgttgaaactctctttttgtggaatctgcaagtggatatgtggacctctccgaagatgtctttggaaacgggaatatcttcacataaaaactaaacagaagcattctcagaaacttcttggtgatgtttgcattcaaatcccagagatgaaccttcctttgatagttcaggtttgaaacactctttttgtaggatctgcaagtggatatttggaccaatctgtggccttcgtttgaaacgggtacatcttcgcataaaatctagacagaagcattctcagaaaatactttgtgatgattgagttgaactcacagagctgaacattcctttggatggagcaggtttgagacacactttttgtagaatctacaagtggatatttggacctctctgaggatttcgttggaaacgggataactgcacctaactaaacggaagcattctcagaaactgctttgtgatgattgcattcacctcacagagttgaacattcctattgatagagcagtttggacacactcttgttgtggaatgtgcaagtggagatttggagcgctttgaggcctatggtagtaaagggaacagcttcatagaaaaactagacagatgcattctcaggaactttttggtgatgtttgtattcaactcccagagttgaactttcctttggaaagagcagctatgaaacactctttttctagaatctgcaagtggacgtttggagggctttgtggtttgtggtggaaaaggaaatatcttcacctaaatactagagagaagcattctcagaagcttctctgtgatgactgcattcaactcacggagttgaacactccttttgagagcgcagttttgaaactctctttctgtggcatccgcaaggggacatgtagacctctttgaagatttcgttggaaacataatcatcttcacataaaaactatacagaagcagtctcagaatcttctttgtggtgtttgcattcaaatcccagagttgaactttcctttcaaagttcacgtttgaaacactctttttgcaggatctacaagtggatatttggaccactctgtgtccttcgttcgaaacgggtatatcttcacatgacatctagacagaagctttctcagaaaattctttgggatgattgagtggaactcacagagctgaacattccttgcgatatagcagtttagaaacacactttctgcagaatctgcaagtgcatatttggacctctctgaggaattcgttggaaacgggataatttcagctgactaaacagaagcattctcagaaccttcttcgtgatgtctgcattcaactcacagtgtggaacctttctttgatagctcaggtttgaaacactcattttgttgaaactgcaaggggataattgcacttctttgaggcctaccgtagaaaaggaaataacttcctatagaaagaagacagaagcattctcagaaccctcttcgtgatgtttgcattcaactcacagtgctgaacctttctttgatagttcagctttgaaacactcttcttgtagaaactgcaagtggatatttggtcctctctgaggatttcgttggaaacgggataaaccgcacagaactaaacagaagaattctcagagccctcttcgtgatgtttgcattcaactcacagtgctgaacctttctttgatagtgcagctttgaaacactctttttgtagaaactgcaagtggatgtttggtcctctctgaggatttcgttggaaacgggataaaccgcacagaactaaaacagaagcattgtcagaaacttctttgtgatgattgcattcaactcacagagttgaaggttccttttcaaacagcagtttccaatcactctttctgtggaatctgcaagtggatatttgggcctctctgaggatttcgttggaaacgggataaaacgcacagaactaaaacagaagcattctcagaaacttctctgtgatgtttgtgttcaactcccagagtttcacgttgcttttcatagagtagttctgaaacatgcttttcgtagtgtctgcaagtggacatttggagcgctttcaggcctgtggtggaaaacgaattatggtcacataaaaactggagagaagccttctcagaaacttctctgtgatgattgcattcaactcacagagttgaaccctcctatggatagagcagtgttgaaactctctttttgtggaatctgcaagtggatatgtggacctctccgaagatgtctttggaaacgggaatatcttcacataaaaactaaacagaagcattctcagaaacttcttggtgatgtttgcattcaaatcccagagttgaaccttcctttgatagttcaggtttgaaacactctttctgtaggatctgcaagtggctatttggaccactctgtggccttcgttcgaaacgggtatatcttcgcataaaatctagacagaagcattctcagaaaatactttgtgatgattgagtttaaatcacagagctgaccattcctttggatggagcaggtttgagacacactttttgtagaatctacaagtggatatttggacctctctgaggatttcgttggaaacgggataactgcacctaactaaacggaagcattctcagaaactgctttgtgatgattgcattcacctcacagagttgaacattcctattgatagagcagtttggaaacactcttgttgtggaatgtgcaagtggagatttggagcgctttgaggcctgtggtagtaaagggaatagcttcatagaaaaactagacagatgcattctcaggaactttttggtgatgtttgtattcaactcccagagttgaactttcctttggaaagagcagctatgaaacactctttttctagaatctgcaagtggacgtttggagggctttgtggtttgtggtggaaaaggaaatatcttcacctaaatactagatagaagcattctcagaagcttctctgtgatgactgcattcaactcacggagttgaacactccttttgagagcgcagttatgaaactccctttctgtggcatctgcaaggggacatgtagacctctttgaagatttcgttggaaacggaatcatcttcacatcaaaactatacagaagcagtctcagaatcttctttgtgatgtttgcattcaaatcccagagttgaactttcctttcaaagttcacgtttgaaacactctttttgcaggatctacaagtggatatttggaccactctgtgtccttcgttcgaaacgggtatatcttcacaggacatctagacagaagctttctcagaaaattctttgcgatgattgagttgaactcacagagctgaacattccttgcgatgtagcagtttagaaacacactttctgcagaatctgcaagtgcatatttggacctctctgaggaattcgttggaaacgggataatttcagctgactaaacagaagcattctcagaaccttcttcgtgatgtctgcattcaactcacagtgtggaacctttctttgatagttcaggtttgaaacactctttttgtagagactgcaaggggataattgcacttctttgaggcctacggtagtaaaggaaataacttcctataaaaagaagacagaagcattctcagaaccctcttcgtgatgtttgcattcaactcacagtgctgaacctttctttgatagttcagctttgaaacactcttcttgtagaaactgcaagtggatatttggtcctctctgaggatttcgttgggaaacgggataaaccgcacagaactaaacagaagcattcacagaaagcacttggtgacgactgagtttaacacacagagctgaacattcctttggagggagcagtttcgaaacacactatttgtagaatctgcaagtggatatttgggcctctctgaggatttcgatggaaacgggataaaccgcacagaactaaaacagaagcattctcagaaaccactttgtgatgattgcattcaagtcacagagttgaacattccctttgacagagcagtttggaaactctctttgtgtagaatctgcaagtggagatatggaccgctttgaggcctatggtagtaaaggaaatagcttcatataaaagctagacagtagcattctcagaaacttctttgtgatgcttgcattcaactcacagagttgaactttcctttcgagagagaagctttgaaacactctttttccagaatctgcaagtggacatttggagggctttgaggcctgtggtggaaaaggaattatcttcccgtaaaagctagatagaagcattgtcagaaacttctttgtgatgattgcattcaactcacagagttgaaggttccttttcaaagagcagtttccaatcactctttgtgtggaatctgcaagtggatatttggacctattttgaagatttcgttggaaacgggagaatcttcacaggaaagctaaacagaagcattctcagaaacttctctgtgatgtttgtgttcaactcccagagtttcacattgcttttcatagagtagttctgaaacatgcttttcgtagtgtctacaagtggacatttggagcgctttcaggcctgtggtggaaaacgaattatggtcacataaaaactggagagaagccttctcagaaacttctctgtgatgattgcattcaactcacagagttgaaccctcctatggatagagcagtgttgaaactctctttttgtggaatctgcaagtggatatgtggacctctccgaagatgtctttggaaacgggaatatcttcacataaaaactaaacagaagcattctcagaaacttcttggtgatgtttgcattcaaatcccagagttgaaccttcctttgatagttcaggtttgaaacactctttttgtaggatctgcaagtggatatttggaccactctgtggccttcgttcgaaacgggtatatcttcgcataaaatctagacagaagcattctcagaaaaatactttgtgatgattgagtttaactcacagagctgaacattcctttggatggagcaggtttgagacacactttttgtagaatctacaagtggatatttggacctctctgaggatttcgttggaaacgggataactgcacctaactaaacggaagcattctcagaaactgctttgtgatgattgcattcacctcacagagttgaacattcctattgatagagcagtttggaaacactcttgttgtggaatgtgcaagtggagatttggagcgctttgaggcctatggtagtaaagggaatagcttcatagaaaaactagacagatgcattctcaggaactttttggtgatgtttgtattcaactcccagagttgaactttcctttggaaagagcagctatgaaacactgtttttctagaatctgcaagtggacgtttggagggctttgtggtttgtggtggaaaaggaaatatcttcacctaaatactagatagaagcatcctcagaagcttctctgtgatgactgcattcaactcacggagttgaacactccttttgagagcgcagttttgaaactctctttctgtggcatctgcaaggggacatgtagacctctttgaagatttcgttggaaacggaatcatcttcacataaaaactacacagaagcagtctcagaatcttctttgtgatgtttgcattcaaatcccagagttgaacttgcctttcaaagttcacgtttgaaacactctttttgcaggatctacaagtggatatttggaccactctgtgtccttcgatcgaaacgggtatatcttcacatgacatctagacagaagctttctcagaaaattctttgggatgattgagttgaactcacagagctgagcattccttgcgatgtagcagtttagaaacacactttctgcagaatctgcaagtgcatatttggacctctgtgaggaattcgttggaaacgggataatttcagctgactaaacagaagcattctcagaaccttcttcgtgatgtctgcattcaactcacagtgtggaacctttctttgatagttcaggtttgaaacactctttttgtagaaactgcaaggggatcattgcactctttgaggagtaccgtagtaaaggaaataacttcctataaaaagaagacagaagcattctcagaaccctcttcgtgatgtttgcattcaactcacagtgctgaacctttctttgatagttcagctttgaaacactcttcttgtagaaactgcaagtggatatttggtcctctctgaggatttcgttggaaacgggataaaccgcacagaactaaacagaagaattctcagagccctcttcgtgatgtttgcattcaactcacagtgctgaacctttctttgatagtgcagctttgaaacactctttttgtagaaactgcaagtggatgtttggtcctctctgaggatttcgttggaaacgggataaaccgcacagaactaaaacagaagcattgtcagaaacttctttgtgatgattgcattcaactcacagagttgaaggttccttttcaaacagcagtttccaatcactctttctgtggaatctgcaagtggatatttgggcctctctgaggatttcgttggaaacgggataaaacgcacagaactaaaacagaagcattctcagaaacttctctgtgatgtttgtgttcaactcccagagtttcacgttgcttttcatagagtagttctgaaacatgcttttcgtagtgtctgcaagtggacatttggagcgctttcaggcctgtggtggaaaacgaattatggtcacataaaaactggagagaagccttctcagaaacttctctgtgatgattgcattcaactcacagagttgaaccctcctatggatagagcagtgttgaaactctctttttgtggaatctgcaagtggatatgtggacctctccgaagatgtctttggaaacgggaatatcttcacataaaaactaaacagaagcattctcagaaacttcttggtgatgtttgcattcaaatcccagagttgaaccttcctttgatagttcaggtttgaaacactctttctgtaggatctgcaagtggctatttggaccactctgtggccttcgttcgaaacgggtatatcttcgcataaaatctagacagaagcattctcagaaaatactttgtgatgattgagtttaaatcacagagctgaccattcctttggatggagcaggtttgagacacactttttgtagaatctacaagtggatatttggacctctctgaggatttcgttggaaacgggataactgcacctaactaaacggaagcattctcagaaactgctttgtgatgattgcattcacctcacagagttgaacattcctattgatagagcagtttggaaacactcttgttgtggaatgtgcaagtggagatttggagcgctttgaggcctgtggtagtaaagggaatagcttcatagaaaaactagacagatgcattctcaggaactttttggtgatgtttgtattcaactcccagagttgaactttcctttggaaagagcagctatgaaacactctttttctagaatctgcaagtggacgtttggagggctttgtggtttgtggtggaaaaggaaatatcttcacctaaatactagatagaagcattctcagaagcttctctgtgatgactgcattcaactcacggagttgaacactccttttgagagcgcagttttgaaactctctttctgtggcatctgcaagggggacatgtagacctctttgaagatttcgttggaaacggaatcatcttcacataaaaactatacagaagcagtctcagaatcttctttgtgatgtttgcattcaaatcccagagttgaactttcctttcaaagttcacgtttgaaacactctttttgcaggatctacaagtggatatttggaccactctgtgtccttcgttcgagacgggtatatcttcacacgacatctagacagaagctttctcagaaaattctttgggatgattgagtggaactcacagagctgaacattccttgcgatgtagcagtttagaaacacactttctgcagaatctgcaagtgcatatttggacctctctgaggaattcgttggaaacgggataatttcagctgactaaacagaagcattctcagaaccttcttcgtgatgtctgcattcaactcacagtgtggaacctttctttgatagttcaggtttgaaacactctttttgtagaaactgcaaggggataattgcacttctttgaggcctaccgtagtaaaggaaataacttcctatagaaagaagacagaagcattctcagaaccctcttcgtgatgtttgcattcaactcacagtgctgaacctttctttgatagttcagctttgaaacactcttcttgtagaaactgcaagtggatatttggtcctctctgaggatttcgttggaaacgggataaaccgcacagaactaaacagaagaattctcagagccctcttcgtgatgtttgcattcaactcacagtgctgaacctttctttgatagtgcagctttgaaacactctttttgtagaaactgcaagtggatgtttggtcctctctgaggatttcgttggaaacgggataaaccgcacagaactaaaacagaagcattgtcagaaacttctttgtgatgattgcattcaactcacagagttgaaggttccttttcaaacagcagtttccaatcactctttctgtggaatctgcaagtggatatttgggcctctctgaggatttcgttggaaacgggataaaacgcacagaactaaaacagaagcattctcagaaacttctctgtgatgtttgtgttcaactcccagagtttcacgttgcttttcatagagtagttctgaaacatgcttttcgtagtgtctgcaagtggacatttggagcgctttcaggcctgtggtggaaaacgaattatggtcacataaaaactggagagaagccttctcagaaacttctctgtgatgattgcattcaactcacaggagttgaaccctcctatggatagagcagtgttgaaactctctttttgtggaatctgcaagtggatatgtggacctctccgaggatgtctttggaaacgggaatatcttcacataaaaactaaacagaagcattctcagaaacttcttggtgatgtttgcattcaaatcccagagttgaaccttcctttgagagttcaggtttgaaacactctttttgtaggatctgcaagtggatatttggaccactctgtggtcttcgttcgaaacgggtacatcttcgcataaaatctagacagaagcattctcagaaaatactttgtgatgattgagtttaaatcacagagctgaccattcctttggatggagcaggtttgagacacactttttgtagaatctacaagtggatatttggacctctctgaggatttcgttggaaacgggataactgcacctaactaaacggaagcattctcagaaactgctttgtgatgattgcattcacctcacagagttgaacattcctattgatagagcagtttggaaacactcttgttgtggaatgtgcaagtggagatttggagcgctttgaggcctgtggtagtaaagggaatagcttcatagaaaaactagacagatgcattctcaggaactttttggtgatgtttgtattcaactcccagagttgaactttcctttggaaagagcagctatgaaacactctttttctagaatctgcaagtggacgtttggagggctttgtggtttgtggtggaaaaggaaatatcttcacctaaatactagatagaagcattctcagaagcttctctgtgatgactgcattcaactcacggagttgaacactccttttgagagcgcagttttgaaactctctttctgtggcatctgcaaggggacatgtagacctctttgaagatttcgttggaaacggaatcatcttcacataaaaactatacagaagcagtctcagaatcttctttgtgatgtttgcattcaaatcccagagttgaactttcctttcaaagttcacgtttgaaacactctttttgcaggatctacaagtggatatttggaccactctgtgtccttcgttcgaaacgggtatatcttcacacgacatctagacagaagctttctcagaaaattctttgggatgattgagtggaactcacagagctgaacattccttgcgatgtagcagtttagaaacacactttctgcagaatctgcaagtgcatatttggacctctctgaggaattcgttggaaacgggataatttcagctgactaaacagaagcattctcagaaccttcttcgtgatgtctgcgttcaactcactgtgtggaacctttctttgatagttcaggtttgaaacactctttttgtagaaactgcaaggggatcattgcacttctttgaggcctaccgtagtaaacgagataacttcctataaaaagaagacagaagcattctcagaaccctcttcgtgatgtttgcattcaactcacagtgctgaacctttctttgatagttcagctttgaaacactctttttgtagaaactgcaagtggatatttggtcctctctgaggatttctttggaaacgggataaaccgcacagaactaaacagaagcattctcagaaccttcttcgtgatgtttgcattcaactcacagtgttgaacctttctttgatagttcaggtttgaaacggtctttctgtagaaactgcaagtagatatttggacctctctgaggatttcgttggaaacgggataaaccgcacagaactaaaacagaagcattcacagaaaactcttggtgacgactgagtttaactcacagagctgaacattcctttggatggagcagtttcgaaacacactatttgtagaatgtgcaagtggatatttgggcctctctgaggatttccttggaaacgggataaaccgcacagaactaaacagaagcattctcagaaactactttgtgatgattgcattcaagtcacagagctgaacattccctttgacggagcagtttggaaactctctttgtgtagaatctgcaagtggagatatggaatgctttgaggactatggtagtaaagggaatagcttcatataaacgctagacagtagcattctcagaaacttctttgtgatgcttgcattcaactcacagagttgaacattcctttcgagagagaagctttgaaacactctttttccagaatctgcaagtggacatttggagggctttgaggcctgtggtggaaaaggaattatcttcccgtaaaagctagatagaagcattgtcagaaacttctttgtgatgattgcattcaactcacagagttgaaggttccttttcaaacagcagtttccaaacactctttctgtggaatctgcaagtggatatttggacctctttgaagatttctttggaaaggggataatcttcacagaaaagctaaacagaagcattctcagaaacttctctgtgatgtttgtgtgcaactcacagagtttcacattgcttctcatagagtagttctgaaacatgcttttcgtagtgtctgcaagtggacatttggagcgctttcaggcctgtggtggaaaacgaattatggtcacataaaaactggagagaagccttctcagaaacttctctgtgatgattgcattcaactcacagagttgaaccctcctatggatagagcagtgttgaaactctctttttgtggaatctgcaagcggatatgtggacctctccgaagatgtctttggaaacgggaatatcttcacataaaaactaaacagaagcattctcagaaacttcttggtgatgtttgcattcaaatcccagagttgaaccttcctttgatagttcaggtttgaaacactgtttttgtaggatctgcaagtggatatttggaacactctgtggccttcgttcgaaacgggtacatcttcgcataaaatctagacagaagcattctcaggaaatactttgtgatgattgagttgaactcacagagctgaacattcctttggatggagcaggtttgagacacactttttgtagaatctacaagtggatatttggacctctctgaggatatcgttggaaacgggataactgcacctaactaaacggaagcattctcagaaactgctttgtgatgattgcattcacctcacagagttgaacattcctattgatagagcagtttggaaacactcttgttgtggaatgtgcaagtggagatttggagcgctttgaggcctatggtagtaaagggaatagcttcatagaaaaactagacagatgcattctcaggtaactttttggtgatgtttgtattcaactcccagagttgaactttcctttggaaagagcagctatgaaacactctttttctagaatctgcaagtggacgtttggagggctttgtggtttgtggtggaaaaggaaatatcttcacctaaatactagatagaagcattctcagaagcttctctgtgatgactgcattcaactcacggagttgaacactccttttgagagcgcagttttgaaactctctttctgtggcatctgcaaggggacatgtagacctctttgaagatttcgttggaaacggaatcatcttcacataaaaactatacagaagcagtctcagaatcttctttgtgatgtttgcattcaaatcccagagttgaactttcctttcaaagttcacgtttgaaacactctttttgcaggatctacaagtggatatttggaccactctgtgtccttcgttcgaaacgggtatatcttcacacgacatctagacagaagctttctcagaaaattctttgggatgattgagtggaactcacagagctgaacattccttgcgatgtagcagtttagaaacacactttctgcagaatctgcaagtgcatatttggacctctctgaggaattcgttggaaacgggataatttcagctgactaaacagaagcattctcagaaccttcttcgtgatgtctgcattcaactcacagtgtggaacctttctttgatagttcaggtttgaaacactctttttgtagaaactgcaaggggataattgcacttctttgaggcctaccgtagtaaaggaaataacttcctatagaaagaagacagaagcattctcagaaccctcttcgtgatgtttgcattcaactcacagtgctgaacctttctttgatagttcagctttgaaacactcttcttgtagaaactgcaagtggatatttggtcctctctgaggatttcgttggaaacgggataaaccgcacagaactaaacagaagaattctcagagccctcttcgtgatgtttgcattcaactcacagtgctgaacctttctttgatagtgcagctttgaaacactctttttgtagaaactgcaagtggatgtttggtcctctctgaggatttcgttggaaacgggataaaccgcacagaactaaaacagaagcattgtcagaaacttctttgtgatgattgcattcaactcacagagttgaaggttccttttcaaacagcagtttccaatcactctttctgtggaatctgcaagtggatatttgggcctctctgaggatttcgttggaaacgggataaaacgcacagaactaaaacagaagcattctcagaaacttctctgtgatgtttgtgttcaactcccagagtttcacgttgcttttcatagagtagttctgaaacatgcttttcgtagtgtctgcaagtggacatttggagcgctttcaggcctgtggtggaaaacgaattatggtcacataaaaactggagagaagccttctcagaaacttctctgtgatgattgcattcaactcacagagttgaaccctcctatggatagagcagtgttgaaactctctttttgtggaatctgcaagtggatatgtggacctctccgaagatgtctttggaaacgggaatatcttcacataaaaactaaacagaagcattctcagaaacttcttggtgatgtttgcattcaaatcccagagttgaaccttcctttgatagttcaggtttgaaacactctttctgtaggatctgcaagtggctatttggaccactctgtggccttcgttcgaaacgggtatatcttcgcataaaatctagacagaagcattctcagaaaatactttgtgatgattgagtttaaatcacagagctgaccattcctttggatggagcaggtttgagacacactttttgtagaatctacaagtggatatttggacctctctgaggatttcgttggaaacgggataactgcacctaactaaacggaagcattctcagcaaactgctttgtgatgattgcattcacctcacagcgttgaacattcctattgatagagcagtttggaaacactcttgttgtggaatgtgcaagtggagatttggagcgctttgaggcctgtggtagtaaagggaatagcttcatagaaaaactagacagatgcattctcaggaaccttttggtgatgtttgtattcaactcccagagttgaactttcctttggaaagagcagctatgaaacactctttttctagaatctgcaagtggacgtttggagggctttgtggtttgtggtggaaaaggaaatatcttcacctaaatactagatagaagcattctcagaagcttctctgtgatgactgcattcaactcacggagttgaacactccttttgagagcgtagttttgaaactctctttctgtggcatctgcaaggggacatgtagacctctttgaagatttcgttggaaacggaatcatcttcacataaaaactatacagaagcagtctcagaatcttctttgtgatgtttgcattcaaatcccagagttgaactttcctttcaaagttcacgtttgaaacactctttttgcaggatctacaagtggatatttggaccactctgtgtccttcgttcgaaacggttatatcttcacaagacatctagacagaagctttctcagaaaattctttgggatgattgagtggaactcacagatctgaacattccttgcgatgtagcagtttagaaacacactttctgcagaatctgcaagtgcatatgtggacctctttgaggaattcgttggaaacgggataatttcagctgactaaacagaagcattctcagaaccttcttcgtgatgtctgcattcaactcacagtgtggaacctttctttgatagttcaggtttgaaacactctttctgtagaaactgcaaggggataattgcactctttgaggagtaccgtagtaaaggaaataacttcctataaaaagaagacagaagcattctcagaaccctcttcgtgatgtttgcattcaactcacagtgctgaacctttctttgatagttcagctttgaaacactctttttgtagaaactgcaagtggatatttggtcctctctgagcatttcgttggaaacgggataaactgcacagaactaaacagaagcattctcagaaccttcttcgtgatgtttgcattcaactcacagtgttgaacctttctttgatagttcaggtttgaaacggtctttctgtagaaactgcaagtagatatttggacctctctgaggatttcgttggaaacgggataacccgcacagaactaaaacagaagcattcacagaaaactcttggtgacgactgagtttaactcacagagctgaacattcctttggatggagcagtttcgaaacacactatttgtagaatgtgcaagtggatatttaggcctctctgaggatttcgttggaaacgggataaaccgcacagaactaaacagaagcattctcagaaactactttgtgatgattgcattcaagtcacagagttgaacattccctttgacagagcagtttggaaactctctttgtgtagaatctgcaagtggagatatggaccgctttgaggcctatggtagtaaaggaaatagcttcatataaaagctagacagtagcattctcagaaacttctttgtgatgcttgcattcaactcacagagttgaactttcctttcgagagagaagctttgaaacactctttttccagaatctgcaagtggacatttggagggctttgaggcctgtggtggaaaaggaattatcttcccgtaaaagctagatagaagcattgtcagaaacttctttgtgatgattgcattcaactcacagagttgaagcttccttttcaaagagcagtttccaatcactctttgtgtggaatctgcaagtggatatttggacctattttgaagatttcgttggaaacgggagaatcttcacaggaaagctaaacagaagcattctcagaaacttctctgtgatgtttgtgttcaactcccagagtttcacattgcttttcatagagtagttctgaaacatgcttttcgtagtgtctacaagtggacatttggagcgctttcaggcctgtggtggaaaacgaattatggtcacataaaaactggagagaagccttctcagaaacttctctgtgatgattgcattcaactcacagagttgaaccctcctatggatagagcagtgttgaaactctctttttgtggaatctgcaagtggatacgtggacctctccgaagatgtctttggaaacgggaatatcttcacataaaaactaaacagaagcattctcagaaacttcttggtgatgtttgcattcaaatcccagagttgaaccttcctttgatagttcaggtttgaaacactctttttgtaggatctgcaagtggatatttggaccactctgtggccttcgttcgaaacgggtatatcttcgcataaaatctagacagaagcattctcagaaaatactttgtgatgattgagtttaactcacagagctgaacattcctttggatggagcaggtttgagacacactttttgtagaatctacaagtggatatttggacctctctgaggatttcgttggaaacgggataactgcacctaactaaacggaagcattctcagaaactgctttgtgatgattgcattcacctcacagagttgaacattcctattgatagagcagtttggaaacactcttgttgtggaatgtgcaagtggagatttggagcgctttgaggcctatggtagtaaagggaatagcttcatagaaaaactagacagatgcattctcaggaactttttggtgatgtttgtattcaactcccagagttgaactttcctttggaaagagcagctatgaaacactgtttttctagaatctgcaagtggacgtttggagggctttgtggtttgtggtggaaaaggaaatatcttcacctaaatactagatagaagcatcctcagaagcttctctgtgatgactgcattcaactcacggagttgaacactccttttgagagcgcagttttgaaactctctttctgtggcatctgcaaggggacatgtagacctctttgaagatttcgttggaaacggaatcatcttcacataaaaactatacagaagcagtctcagaatcttctttgtgatgtttgcattcaaatccccgagttgaactttcctttcaaagttcacgtttgaaacactctttttgcaggatctacaagtggatatttggaccactctgtgtccttcgttcgaaacgggtatatcttcacatgacatctagacagaagctttctcagaaaattctttgggatgattgagttgaactcacagagctgagcattccttgcgatgtagcagtttagaaacacactttctgcagaatctgcaagtgcatatttggacctctgtgaggaattcgttggaaacgggataatttcagctgactaaacagaagcattctcagaaccttcttcgtgatgtctgcattcaactcacagtgtggaacctttctttgatagttcaggtttgaaacactctttctgtagaaactgcaaggggatcattgcactctttgaggagtaccgtagtaaaggaaataacttcctataaaaagaagacagaagcattctcagaaccctcttcgtgatgtttgcattcaactcacagtgctgaacctttctttgatagttcagctttgaaacactctttttgtagaaactgcaagtggatatttggtcctctctgagcatttcgttggaaacgggataaactgcacagacctaaacagaagcattctcagaaccttcttcgtgatgtttgcattcaactcacagtgttgaacctttctttgatagttcaggtttgaaacggtctttctgtagaaactgcaagtagatatttggacctctctgaggatttcgttggaaacgggataacccgcacagaactaaaacagaagcattcacagaaaactcttggtgacgactgagtttaactcacagagctgaacattcctttggatggagcagtttcgaaacacactatttgtagaatgtgcaagtggatatttaggcctctctgaggatttcgttggaaacgggataaaccgcacagaactaaacagaagcattctcagaaactactttgtgatgattgcattcaagtcacagagttgaacattccctttgacagagcagtttggaaactctctttgtgtagaatctgcaagtggagatatggaccgctttgaggcctatggtagtaaaggaaatagcttcatataaaagctagacagtagcattctcagaaacttctttgtgatgcttgcattcaactcacagagttgaactttcctttcgagagagaagctttgaaacactctttttccagaatctgcaagtggacatttggagggctttgaggcctgtggtggaaaaggaattatcttcccgtaaaagctagatagaagcattgtcagaaagttctttgtgatgattgcattcaactcacagagttgaaggttccttttcaaagagcagtttccaatcactctttctgtggaatctgcaagtggatatttcgacctctttgaagatttcgttggaaacgggagaacattcacagaaaagctaaacagaagcattctcagaaacttctctgtgatgtttgtgttcaactcccatagtttcacgttgcttttcatagagtagttctgaaacatgcttttcgtagtgtctgcaagtggacatttggagcgctttcaggcctgtggtggaaaacgaattatggtcacataaaaactggagagaagccttctcagaaacttctctgtgatgattgcattcatctcaaagagttgaaccctcctatggatagagcagtgttgaaactctgtttttgtggaatctgcaagtggatatgtggacctcgccaaagatgtctttggaaacgggaatatcttcacataaaaactaaacagaagcattctcagaaacttcttggtgatgtttgcattcaaatcccagagttgaaccttcctttgatagttcaggtttgaaacaatctttttgtaggatctgcaagtggatatttggaccactctgtggccttcgttcaaaacgggtacatcttcgcataatatctagacagaagcattctcagaaaatactttgtgatgattgagtttaactcacagagctgaacattcctttggatggagcaggtttgagacacaccttttgtagaatctacaagtggatatttggacctctctgaggatttcgttggaaacgggataactgcacctaactaaacggaagcattctcagaaactgctttgtgatgattgcattcacctcacagagttgaacattcctattgatagagcagtttggaaacactcttgttgtggaatgtgcaagtggagatttggagcgctttgaggcctatggtagtaaagggaatagcttcatagaaaaactagacagatgcattctcaggaactttttggtgatgtttgtattcaactcccagagttgaactttcctttggaaagagcagctatgaaacactgtttttctagaatctgcaagtggacgtttggagggctttgtggtttgtggtggaaaaggaaatatcttcacctaaatactagatagaagcatcctcagaagcttctctgtgattactgcattcaactcacggagttgaacactccttttgagagcgcagttttgaaactctctttctgtggcatctgcaaggggacatgtagacctctttgaagatttcgttggaaacggaatcatcttcacataaaaactacacagaagcagtctcagaatcttctttgtgatgtttgcattcaaatcccagagttgaactttcctttcaaagttcacgtttgaaacactctttttgcaggatctacaagtggatatttggaccactctgtgtccttcgttcgaaacgggtatatcttcacacgacatctagacagaagctttctcagaaaattctttgggatgattgagtggaactcacagagctgaacattccttgcgatgtagcagtttagaaacacactttctgcagaatctgcaagtgcatatttggacctctctgaggaattcgttggaaacgggataatttcagctgactaaacagaagcattctcagaaccttcttcgtgatgtctgcattcaactcacagtgtggaacctttctttgatagttcaggtttgaaacactctttttgtagaaactgcaaggggataattgcacttctttgaggcctaccgtagtaaaggaaataacttcctatagaaagaagacagaagcattctcagaaccctcttcgtgatgtttgcattcaactcacagtgctgaacctttctttgatagttcagctttgaaacactcttcttgtagaaactgcaagtggatatttggtcctctctgaggatttcgttggaaacgggataaaccgcacagaactaaacagaagaattctcagagccctcttcgtgatgtttgcattcaactcacagtgctgaacctttctttgatagtgcagctttgaaacactctttttgtagaaactgcaagtggatgtttggtcctctctgaggatttcgttggaaacgggataaaccgcacagaactaaaacagaagcattgtcagaaacttctttgtgatgattgcattcaactcacagagttgaaggttccttttcaaacagcagtttccaatcactctttctgtggaatctgcaagtggatatttgggcctctctgaggatttcgttggaaacgggataaaacgcacagaactaaaacagaagcattctcagaaacttctctgtgatgtttgtgttcaactcccagagtttcacgttgcttttcatagagtagttctgaaacatgcttttcgtagtgtctgcaagtggacatttggagcgctttcaggcctgtggtggaaaacgaattatggtcacataaaaactggagagaagccttctcagaaacttctctgtgatgattgcattcaactcacagagttgaaccctcctatggatagagcagtgttgaaactctctttttgtggaatctgcaagtggatatgtggacctctccgaagatgtctttggaaacgggaatatcttcacataaaaactaaacagaagcattctcagaaacttcttggtgatgtttgcattcaaatcccagagttgaaccttcctttgatagttcaggtttgaaacactctttctgtaggatctgcaagtggctatttggaccactctgtggccttcgttcgaaacgggtatatcttcgcataaaatctagacagaagcattctcagaaaatactttgtgatgattgagtttaaatcacagagctgaccattcctttggatggagcaggtttgagacacactttttgtagaatctacaagtggatatttggacctctctgaggatttcgttggaaacgggataactgcacctaactaaacggaagcattctcagaaactgctttgtgatgattgcattcacctcacagagttgaacattcctattgatagagcagtttggaaacactcttgttgtggaatgtgcaagtggagatttggagcgctttgaggcctatggtagtaaagggaatagcttcatagaaaaactagacagatgcattctcaggaactttttggtgatgtttgtattcaactcccagagttgaactttcctttggaaagagcagctatgaaacactctttttctagaatctgcaagtggacgtttggagggctttgtggtttgtggtggaaaaggaaatatcttcacctaaatactagatagaagcattctcagaagcttctctgtgatgactgcattcaactcacggagttgaacactccttttgagagcgcagttttgaaactctctttctgtggcatctgcaaggggacatgtagacctctttgaagatttcgttggaaacggaatcatcttcacataaaaactatacagaagcagtctcagaatcttctttgtgatgtttgcattcaaatcccagagttgaactttcctttcaaagttcacgtttgaaacactctttttgcaggatctacaagtggatatttggaccactctgtgtccttcgttcgaaacgggtatatcttcacacgacatctagacagaagctttctcagaaaattctttgggatgattgagtggaactcacagagctgaacattccttgcgatggagcagtttagaaacacactttctgcagaatctgcaagtgcatatttggacctctctgaggaattcgttggaaacgggataatttcagctgactaaacagaagcattctcagaaccttcttcgtgatgtctgcattcaactcacagtgtggaacctttctttgatagttcaggtttgaaacactctttttgtagaaactgcaaggggataattgcacttctttgaggcctaccgtagtaaaggaaataacttcctatagaaagaagacagaagcattctcagaaccctcttcgtgatgtttgcattcaactcacagtgctgaacctttctttgatagttcagctttgaaacactcttcttgtagaaactgcaagtggatatttggtcctctctgaggatttcgttggaaacgggataaaccgcacagaactaaacagaagaattctcagagccctcttcgtgatgtttgcattcaactcacagtgctgaacctttctttgatagtgcagctttgaaacactctttttgtagaaactgcaagtggatgtttggtcctctctgaggatttcgttggaaacgggataaaccgcacagaactaaaacagaagcattgtcagaaacttctttgtgatgattgcattcaactcacagagttgaaggttccttttcaaacagcagtttccaatcactctttctgtggaatctgcaagtggatatttgggcctctctgaggatttcgttggaaacgggataaaacgcacagaactaaaacagaagcattctcagaaacttctctgtgatgtttgtgttcaactcccagagtttcacgttgcttttcatagagtagttctgaaacatgcttttcgtagtgtctgcaagtggacatttggagcgctttcaggcctgtggtggaaaacgaattatggtcacataaaaactggagagaagccttctcagaaacttctctgtgatgattgcattcaactcacagagttgaaccctcctatggatagagcagtgttgaaactctctttttgtggaatctgcaagtggatatgtggacctctccgaagatgtctttggaaacgggaatatcttcacataaaaactaaacagaagcattctcagaaacttcttggtgatgtttgcattcaaatcccagagttgaaccttcctttgatagttcaggtttgaaacactctttctgtaggatctgcaagtggctatttggaccactctgtggccttcgttcgaaacgggtatatcttcgcataaaatctagacagaagcattctcagaaaatactttgtgatgattgagtttaaatcacagagctgaccattcctttggatggagcaggtttgagacacactttttgtagaatctacaagtggatatttggacctctctgaggatttcgttggaaacgggataactgcacctaactaaacggaagcattctcagaaactgctttgtgatgattgcattcacctcacagagttgaacattcctattgatagagcagtttggaaacactcttgttgtggaatgtgcaagtggagatttggagcgctttgaggcctgtggtagtaaagggaatagcttcatagaaaaactagacagatgcattctcaggaactttttggtgatgtttgtattcaactcccagagttgaactttcctttggaaagagcagctatgaaacactctttttctagaatctgcaagtggacgtttggagggctttgtggtttgtggtggaaaaggaaatatcttcacctaaatactagatagaagcattctcagaagcttctctgtgatgactgcattcaactcacggagttgaacactccttttgagagtgcagttttgaaactctctttctgtggcatccgcaaggggacatgtggacctctttgaagatttcgttggaaacggaatcatcttcacatcaaaactatacagaagcagtctcagaatcttctttgtgatgtttgcattcaaatcccagagttgaactttcctttcaaagttcacgtttgaaacactctttttgcaggatctacaagtggatatttggaccactctgtgtccttcgttcgaaacgggtatatcttcacatgacatctagacagaagctttctcagaaaattctttgggatgattgagtggaactcacagagctgaacattccttgcaatgtagcagtttagaaacacactttctgcagaatctgcaagtgcatatttggacctctctgaggaattcgttggaaacgggataatttcagctgactaaacagaagcattctcagaaccttcttcgtgatgtctgcattcaactcacagtgtggaacctttctttgatagttcaggtttgaaacactctttttgtagaaactgcaaggggataattgcacttctttgaggcctaccgtagtaaaggaaataacttcctatagaaagaagacagaagcattctcagaaccctcttcgtgatgtttgcattcaactcacagtgctgaacctttctttgatagttcagctttgaaacactcttcttgtagaaactgcaagtggatatttggtcctctctgaggatttcgttggaaacgggataaaccgcacagaactaaacagaagaattctcagagccttcttcgtgatgtttgcattcaactcacagtgctgaacctttctttgatagtgcagctttgaaacactctttttgtagaaactgcaagtggatgtttggtcctctctgaggatttcgttggaaacgggataaaccgcacagaactaaaacagaagcattgtcagaaacttctttgtgatgattgcattcaactcacagagttgaaggttccttttcaaacagcagtttccaatcactctttctgtggaatctgcaagtggatatttgggcctctctgaggatttcgttggaaacgggataaaacgcacagaactaaaacagaagcattctcagaaacttctctgtgatgtttgtgttcaactcccagagtttcacgttgcttttcatagagtagttctgaaacatgcttttcgtagtgtctgcaagtggacatttggagcgctttcaggcctgtggtggaaaacgaattatggtcacataaaaactggagagaagccttctcagaaacttctctgtgatgattgcattcaactcacagagttgaaccctcctatggatagagcagtgttgaaactctctttttgtggaatctgcaagtggatatgtggacctctccgaagatgtctttggaaacgggaatatcttcacataaaaactaaacagaagcattctcagaaacttcttggtgatgtttgcattcaaatcccagagttgaaccttcctttgatagttcaggtttgaaacactctttctgtaggatctgcaagtggctatttggaccactctgtggccttcgttcgaaacgggtatatcttcgcataaaatctagacagaagcattctcagaaaatactttgtgatgattgagtttaaatcacagagctgaccattcctttggatggagcaggtttgagacacactttttgtagaatctacaagtggatatttggacctctctgaggatttcgttggaaacgggataactgcacctaactaaacggaagcattctcagaaactgctttgtgatgattgcattcacctcacagagttgaacattcctattgatagagcagtttggaaacactcttgttgtggaatgtgcaagtggagatttggagcgctttgaggcctatggtagtaaagggaatagcttcatagaaaaactagacagatgcattctcaggaactttttggtgatgtttgtattcaactcccagagttgaactttcctttggaaagagcagctatgaaacactctttttctagaatctgcaagtggacgtttggagggctttgtggtttgtggtggaaaaggaaatatcttcacctaaatactagatagaagcattctcagaagcttctctgtgatgactgcattcaactcacggagttgaacactccttttgagagcgcagttttgaaactctctttctgtggcatctgcaaggggacatgtagacctctttgaagatttcgttggaaacggaatcatcttcacataaaaactatacagaagcagtctcagaatcttctttgtgatgtttgcattcaaatccctgagttgaactttcctttccaagttcacgtttgaaacactctttttgcaggatctacaagtggatatttggaccactctgtgtccttcgttcgaaacgggtatatcttcacatgacatctagacagaagctttctcagaaaattctttgggatgattgagttgagcaaacagagctgaacactccttgcgatgtagcagtttagaaacacactttctgcagaatctgcaagtgcatatgtggacctctctgaggaattcgttggaaacgggataatttcagctgactaaacagaagcattctcagaaccttattcgtgatgtctgcattcaactcacagtgtggaacctttctttgatagttcaggtttgaaacactctttttgtagaaactgcaaggggatcattgcacttctttgaggcctaccgtagtaaaggagataacttcctataaaaagaagacagaagcattctcagaaccctcttcgtgacgtttgcattcaactcacggtgctgaacctttcttggatagttcagctttgaaacactctttttgtagaaactgcaagtggatatttggtccactctgaggatttcgttggaaacgggataaaccgcacagaactaaacagaagcattctcagaaccttcttcgtgatgtttgcattcaactcacagtgttgaacctttctttgatagttcaggtttgaaacggtctttctgtagaaactgcaagtagatatttggacctctctgaggatttcgttggaaacgggataaaccgcacagaactaaaacagaagctttcacagaaaactcttggtgacgactgagtttaactcacagagctgaacattcctttggatggagcagtttcgaaacacactatttgtagaatgtgcaagtggatatgtgggcctctctgaggatttcgttggaaacgggataaaccgcacagaactaaacagaagcattctcagaaactactttgtgatgattgcattcaagtcacagagttgaacattccctttgacagagcagtttggaaactctctttgtgtagaatctgcaagtggagatatggaccgctttgaggcctatggtagtaaaggaaatagcttcatataaaagctagacagtagcattctcagaaacttctttgtgatgcttgcattcaactcacagagttgaactttcctttcgagagagaagctttgaaacactctttttccagaatctccaagtggacatttggagggctttgaggcctgtggtggaaaaggaattatcttcccgtaaaagctagatagaagcattgtcagaaacttctttgtgatgattgcattcaactcacagagttgaaggttccttttcaaagagcagtttccaatcactctttgtgtggaatctgcaagtggatatttggacctattttgaagatttcgttggaaatgggagaatcttcacaggaaagctaaacagaagcattctcagaaacttctctgtgatgtttgtgttcaactcccagagtttcacattgcttttcatagagtagttctgaaacatgcttttcgtagtgtctacaagtggacatttggagcgctttcaggcctgtggtggaaaacgaattatggtcacataaaaactggagagaagccttctcaagaaacttctctgtgatgattgcattcaactcacagagttgaaccctcctatggatagagcagtgttgaaactctctttttgtggaatctgcaagtggatacgtggacctctccgaagatgtctttggaaacgggaatatcttcacataaaaactaaacagaagcattctcagaaacttcttggtgatgtttgcattcaaatcccagagttgaaccttcctttgatagttcaggtttgaaacactctttttgtaggatctgcaagtggatatttggaccactctgtggccttcgttcgaaacgggtatatcttcgcataaaatctagacagaagcattctcagaaaatactttgtgatgattgagttgaactcacagagctgaacattcctttggatggagcaggtttgagacacactttttgtagaatctacaagtggatatttggacctctctgaggatttcgttggaaacgggataactgcacctaactgaacggaagcattctcagaaactgctttgtgatgattgcattcacctcacagagttgaacattcctattgatagagcagtttggaaacactcttgttgtggaatgtgcaagtggagatttggagcgctttgaggcctatggtagtaaagggaatagcttcatagaaaaactagacagatgcattctcaggaactttttggtgatgtttgtattcaactcccagagttgaactttcctttggaaagagcagctatgaaacactgtttttctagaatctgcaagtggacgtttggagggctttgtggtttgtggtggaaaaggaaatatcttcacctaaatactagatagaagcattctcagaagcttctctgtgatgactgcattcaactcacggagttgaacactccttttgagagcgcagttttgaaactctctttctgtggcatctgcaaggggacatgtagacctctttgaagatttcgttggaaacggaatcatcttcacataaaaactatacagaagcagtctcagaatcttctttgtgatgtttgcattcaaatcccagagttgaactttcctttcaaagttcacgtttgaaacactctttttgcaggatctacaattttatatttggaccactctgtgtccttcgttcgaaacggctatatcttcacatgacatctagacagaagctttctcagaaaattctttgggatgattgagttgaactcacagagctgagtattccttgcgatgtagcagtttagaaacacactttctgcagaatctgcaagtgcatatttggacctctctgaggaattcgttggaaacaggataatttcagctgactaaacagaagcattctcagaaccttcttcgtgatgtctgcattcaactcaaagtgtggaacctttctttgatagttcaggttttaaaaactctttttatagaaactgcaaggggataattgcactctttgaggagtaccgtagtaaaggaaataacttcctataaaaagaagacagaagcattctcagaaccctcttcgtgatgtttgcattcaactcacagtgctgaacctttctttgatagttcagctttgaaacactctttttgtagaaactgcaagtggatatttggtcctctctgaggatttcgttggaaacgggataaaacgcacagaacgaaacagaagcattctcagaaccttcttcgtgatgtttgcattcaactcacagtgttgaacctttctttgatagttcaggtttgaaacggtctttctgtagaaactgcaagtagatatttggacctctctgaggatttcgttggaaacgggataaaccgcacagaactaaaacagaagcattctcagaaccctcttcgtgatgtttgcattcaactcacggtgctgaacctttctttgatagttcagctttgaaacacactttttgtagaaactgcaagtggatatttggtcctctctgaggatttcgttggaaacgggataaaccgcacagaactaaacagaagcattctcagaaccttcttcgtgatgtttgcattcaactcacagtgttgaacctttctttgatagttcaggtttgaaacggtctttctgtagaaactgcaagtagatatttggacctctctgaggatttcgttggaaacgggataaaccgcacagaactaaaacagaagcattcacagaaaactcttggtgacgactgagtttaactcacagagctgaacattcctttggatggagcagtttcgaaacacactatttgtagaatgtgcaagtggatatgtgggcctctctgaggatttcgttggaaacgggataaaccgcacagaactaaacagaagcattctcagaaactactttgtgatgattgcattcaagtcacagagttgaacattccctttgacagagcagtttggaaactctctttgtgtagaatctgcaagtggagatatggaccgctttgaggcctatggtagtaaaggaaatagcttcatataaaagctagacagtagcattctcagaaacttctttgtgatgcttgcattcaactcacagagttgaactttcctttcgagagagaagctttgaaacactctttttccagaatctgcaagtggacatttggagggctttgaggcctgtggtggaaaaggaattatcttcccgtaaaagctagatagaagccttctcagaaacttctctgtgatgattgcattcaactcacagagttgaaggttccttttcaaagagcagtttccaatcactctttctgtggagtctgcaagtggatatttggacctattttgaagatttcgttggaaacgggagaatcttcacaggaaagctaaacagaagcattctcagaaacttcttggtgatgtttgcattcaaatcccagagtagaaccttcctttgatagttcaggtttgaaacactctttttgtaggatctgcaagtggatatttggaccactctgtggccttcgttcgaaacgggtatatcttcgcataaaatctagacagaagcattctcagaaaatactttgtgatgattgagtttaactcacagagctgaacattcctttggatggagcaggtttgagacacactttttgtagaatctacaagtggatatttggacctctctgaggatttcgttggaaacgggataactgcacctaactaaacggaagcattctcagaaactgctttgtgatgattgcattcacctcacagagttgaccattcctattgatagagcagtttggaaacactcttgttgtggaatgtgcaagtggagatttggagcgctttgaggcctatggtagtaaagggaatagcttcatagaaaaactagacagatgcattctcaggaactttttggtgatgtttgtattcaactcccaaagttgaactttcctttggaaagagcagctatgaaacactctttttctagaatctgcaagtggacgtttggagggctttgtggtttgtggtggaaaaggaaatatcttcacctaaatactagatagaagcattctcagaagcttctctgtgatgactgcattcaactcacggagttgaacactccttttgagagcgcagttttgaaactctctttctgtggcatctgcaaggggacatgtagacctctttgaagatttcgttggaaacggaatcatcttcacataaaaactatacagaagcagtctcagaatcttctttgtgatgtttgcattcaaatcccagagttgaacttccctttcaaagttcacgtttgaaacactctttttgcaggatctacaagtggatatttggaccactctgtgtccttcgttcgaaacgggtatatcttcacatgacatctagacagaagctttctcagaaaatcctttgggatgattgagtggaactcacagagctgaacattccttgcgatgtagcagtttagaaacacactttctgcagaatctgcaagtgcatatttggacctctctgaggaattcgttggaaacgggataatttcagctgactaaacagaagcattctcagaaccttcttcgtgatgtctgcattcaactcacagtgtggaacctttctttgatagttcaggtttgaaacactctttttgtagaaactgcaaggggataattgcacttctttgaggcctaccgtagtaaaggaaataacttcctatagaaagaagacagaagcattctcagaatcttcttcgtgatgtttgcattcaactcacagtgctgaacctttctttgatagttcagctttgaaacactcttcttgtagaaactgcaagtggatatttggtcctctctgaggatttcgttggaaacgggataaaccgcacagaactaaacagaagcattctcagaaccttcttcgtgatgtttgcattcaactcacagtgttgaacctttctttgatagttcaggtttgaaacggtctttctgtagaaactgcaagtagatatttggacctctctgaggatttcgttggaaacgggataacccgcacagaactaaaacagaagcattcacagaaaactcttggtgacgactgagtttaactcacagagctgaacattcctttggatggagcagtttcgaaacacactatttgtagaatgtgcaagtggatatttaggcctctctgaggatttcgttggaaacgggataaaccgcacagaactaaacagaagcattctcagaaactactttgtgatgattgcattcaagtcacagagttgaacattccctttgacagagcagtttggaaactctctttgtgtagaatctgcaagtggagatatggaccgctttgaggcctatggtagtaaaggaaatagcttcatataaaagctagacagtagcattctcagaaacttctttgtgatgcttgcattcaactcacagagttgaactttcctttcgagagagaagctttgaaacactctttttccagaatctgcaagtggacatttggagggctttgaggcctgtggtggaaaaggaattatcttcccgtaaaagctagatagaagcattgtcagaaacttctttgtgatgattgcattcaactcacagagttgaaggttccttttcaaacagcagtttccaatcactctttctgtggaatctgcaagtggatatttggacctattttgaagatttccttggaaacgggataatcttcacagaaaagctaaacagaagcattctcagaaacttctctgtgatgtttgtgttcaactcccagagtttcacgttgcttttcatagagtagttctgaaacatgcttttcgtagtgtctgcaagtggacatttggagcgctttcaggcctgtggtggaaaacgaattatggtcacataaaaactggagagaagccttctcagaaacttctctgtgatgattgcattcaactcacagagttgaaccctcctatggatagagcagtgttgaaactctctttttgtggaatctgcaagtggatatgtggacctctccgaagatgtctttggaaacgggaatatcttcacataaaaactaaacagaagcattctcagaaacttcttggtgatgtttgcattcaaatcccagagttgaaccttcctttgatagttcaggtttgaaacactctttctgtaggatctgcaagtggctatttggaccactctgtggccttcgttcgaaacgggtatatcttcgcataaaatctagacagaagcattctcagaaaatactttgtgatgattgagtttaaatcacagagctgaccattcctttggatggagcaggtttgagacacactttttgtagaatctacaagtggatatttggacctctctgaggatttcgttggaaacgggataactgcacctaactaaacggaagcattctcagaaactgctttgtgatgattgcattcacctcacagagttgaacattcctattgatagagcagtttggaaacactcttgttgtggaatgtgcaagtggagatttggagcgctttgaggcctatggtagtaaagggaatagcttcatagaaaaactagacagatgcattctcaggaaccttttggtgatgtttgtattcaactcccagagttgaactttcctttggaaagagcagctatgaaacactctttttctagaatctgcaagtggacgtttggagggctttgtggtttgtggtggaaaaggaaatatcttcacctaaatactagacagaagcattctcagaagcttctctgtgatgactgcattcaactcacggagttgaacactccttttgagagcgcagttttgaaactctctttctgtggcatctgcaaggggacatgtagacctctttgaagatttcgttggaaacggaatcatcttcacataaaaactatacagaagcagtctcagaatcttctttgtgatgtttgcattcaaatcccagagttgaactttcctttcaaagttcacgtttgaaacactctttttgcaggatctacaagtggatatttggaccactctgtgtccttcgttcgaaacgggtatatcttcacatgacatctagacagaagctttctcagaaaattcttggggatgattgagtggaactcacagagctgaacattccttgcgatgtagcagtttagaaacacactttctgcagaatctgcaagtgcatatttggacctctctgaggaattcgttggaaacgggataatttcagctgactaaacagaagcattctcagaaccttcttcgtgatgtctgcattcaactcacagtgtggaacctttctttgatagttcaggtttgaaacactctttttgtagaaactgcaaggggataattgcacttctttgaggcctaccgtagtaaaggaaataacttcctatagaaagaagacagaagcattctcagaaccctcttcgtgatgtttgcattcaacccacggtgctgaacctttctttgatagttcagctttgaaacactctttttgtagaaactgcaagtggatatttggtcctctatgaggatttcgttggaaacgggataaaccgcacagaactaaacagaagcattctcagaaccttcttcgtgatgtttgcattcaactcacagtgttgaacctttctttgatagttcaggtttgaaacggtctttctgtagaaactgcaagtagatatttggacctctctgaggatttcgttggaaacgggataaaccgcacagaactaaaacagaagcattcacagaaaactcttggtgacgactgagtttaactcacagagctgaacattcctttggatggagcagtttcgaaacacactatttgtagaatgtgcaagtggatatttgggcctctctgaggatttcgttggaaacgggataaaccgcacagaactaaacagaagcattctcagaaactactttgtgatgattgcattcaagtcacagagttgaacattccctttgacagagcagtttggaaactctctttctgtagaatctgcaagtggagatatggaccgctttgaggcctatggtagtaaaggaaatagcttcatataaaagctagacagtagcattctcagaaacttctttgtgatgcttgcattcaactcacagagttgaactttcctttcgagagagaagctttgaaacactctttttccagaatctgcaagtggacatttggagggctttgaggcctgtggtagaaaaggaattaacttcccgtaaaagctagatagaagcattgtcagaaacttctttgtgatgattgcattcaactcacagagttgaaggttccttttcaaacagcagtttccaatcactctttctgtggaatctgcaagtggatatttgggcctctctgaggatttcgttggaaacgggataaaacgcacagaactaaaacagaagcattctcagaaacttctctgtgatgtttgtgttcaactcccagagtttcacgttgcttttcatagagtagttctgaaacatgcttttcgtagtgtctgcaagtggacatttggagcgctttcaggcctgtggtggaaaacgaattatggtcacataaaaactggagagaagccttctcagaaacttctctgtgatgattgcattcaactcacagagttgaaccctcctatggatagagcagtgttgaaactctctttttgtggaatctgcaagtggatatgtggacctctccgaagatgtctttggaaacgggaatatcttcacataaaaactaaacagaagcattctcagaaacttcttggtgatgtttgcattcaaatcccagagttgaaccttcctttgatagttcaggtttgaaacactctttttgtaggatctgcaagtggctatttggaccactctgtggccttcgttcgaaacgggtatatcttcgcataaaatctagacagaagcattctcagaaaatactttgtgatgattgagtttaactcacagagctgaacattcctttggatggagcaggtttgagacacaccttttgtagaatctacaagtggatatttggacctctctgaggatttcgttggaaacgggataactgcacctaactaaacggaagcattctcagaaactgctttgtgatgattgcattcacctcacagagttgaacattcctattgatagagcagtttggaaacactcttgttgtggaatgtgcaagtggagatttggagcgctttgaggcctatggtagtaaagggaatagcttcatagaaaaactagacagatgcattctcaggaactttttggtgatgtttgtattcaactcccagagttgaactttcctttggaaagagcagctatgaaacactctttttctagaatctgcaagtggacgtttggagggctttgtggtttgtggtggaaaaggaaatatcttcacctaaatactagatagaagcattctcagaagcttctctgtgatgactgcattcaactcacggagttgaacactccttttgagagcacagttttgaaactctctttctgtggcatctgcaaggggacatgtagacctctttgaagatttcgttggaaacggaatcatcttcacatcaaaactatacagaagcagtctcagaatcttctttgtgatgtttgcattcaaatcccagagttgaactttcctttcaaagttcacgtttgaaacactctttttgcaggatctacaagtggatatttggaccactctgtgtccttcgttcgaaacgggtatatcttcacatgacatctagacagaagctttctcagaaaattctttgggatgattgagttgagcaaacagagctgaacactccttgcgatgtagcagtttagaaacacactttctgcagaatctgcaagtgcatatgtggacctctctgaggaattcgttggaaacgggataatttcagctgactaaacagtagcattctcagaaccttcttcgtgatgtctgcattcaactcacagtgtggaacctttctttgatagttcaggtttgaaacactctttttgtagaaactgcaaggggatcattgcacttctttgaggcctaccgtagtaaaggagataacttcctataaaaagaagacagaagcattctcagaaccctcttcgtgatgtttgcattcaactcacggtgctgaaactttctttgatagttcagctttgaaacacactttttgtagaaactgcaagtggatatttggtcctctctgaggatttcgttggaaacgggataaaccgcacagaactaaacagaagcattctcagaaccttcttcgtgatgtttgcattcaactcacagtgttgaacctttctttgatagttcaggtttgaaacggtctttctgtagaaactgcaagtagatatttggacctctctgaggatttcgttggaaacgggataacccgcacagaactaaaacagaagcaatcacagaaaactcttggtgacgactgagtttaactcacagagctgaacattcctttggatggagcagtttcgaaacacactatttgtagaatctgcaagtggatatttgggcctctctgaggatttcgttggaaacgggataaaacgcacagaactaaaacagaagaattctcagaaactactttgtgatgattgcattcaagtcacagagttgaacattccctttgacagagcagtttggaaactctctttgtgtagaatctgcaagtggagatatggaccgctttgaggtctatggtagtaaaggaaagagcttcatataaaagctagacagtagcattctcagaaacttctttgtgatgcttgcattcaactcacagagttgaactttcctttcgagagagaagctttgaaacactctttttccagaatgtgcaagtggacatttggggagctttgaggcctgtgctggaaaaggaattatcttcccgtaaaagctagatagaagcattgtcagaaacttctttgtgatgattgcattcaactcacagagttgaaggttccttttcaaacagcagtttccaatcactctttctgtggaatctgcaagtggatatttcgacctctttgaagatttcgttggaaacgggagaatcttcacagaaaagctaaacagaagcattctcagaaacttctctgtgatgtttgtgttcaactcccagagtttcacattgcttttcatagagtagttctgaaacatgcttttcgtagtgtctgcaagtggacatttggagcgctttcaggcctgtggtggaaaacgaattatggtctcataaaaactggagagaagccttctcagaaacttctctgtgatgattgcattcaactcacagagttgaacgctcctatggatagagcagtgttgaaactctctttttgtggaatctgcaagtggatatgtggacctctccgaagatgtctttggaaacggtaatatcttcacataataactaaacagaagcattctcagaaacttcttggtgatgtttgcattcaaatcccagagttgaaccttcctttgatagttcaggtttgaaacactctttttgtaggatctgcaagtggctatttggaccactctgtggccttcgttcgaaacgggtatatcttcgcataaaatctagacagaagcattctcagaaaatactttgtgatgattgagtttaaatcacagagctgaccattcctttggatggagcaggtttgagacacactttttgtagaatctacaagtggatatttggacctctctgaggatttcgttggaaacgggataactgcacctaactaaacggaagcattctcagaaactgctttgtgatgattgcattcacctcacagagttgaacattcctattgatagagcagtttggaaacactcttgttgtggaatgtgcaagtggagatttggagcgctttgaggcctatggtagtaaagggaatagcttcatagaaaaactagacagatgcattctcaggaactttttggtgatgtttgtattcaactcccagagttgaactttcctttggaaagagcagctatgaaacactctttttctagaatctgcaagtggacgtttggagggctttgtggtttgtggtggaaaaggaaatatcttcacctaaatactagatagaagcattctcagaagcttctctgagatgactgcattcaactcacggagttgaacactccttttgagagcgcagttttgaaactctctttctgtggcatctgcaaggggacatgtagacctctttgaagatttcgttggaaacggaatcatcttcacataaaaactatacagaagcagtctcagaatcttctttgtgatgtttgcattcaaatccccgagttgaactttcctttcaaagttcacgtttgaaacactctttttgcaggatctacaagtggatatttggaccactctgtgtccttcgttcgaaacgggtatatcttcacatgacatctagacagaagctttctcagaaaattctttgggatgattgagtagaactcacagagctgagcattccttgcgatgtagcagtttagaaacacactttctgcagaatctgcaagtgcatatttggacctactgtgaggaattcgttggaaacgggataatttcagctgactaaacagaagcattctcagaaccttcttcgtgatgtctgcattcaactcacagtgtggaacctttctttgatagttcaggtttgaaacactctttctgtagaaactgcaaggggataattgcactctttgaggagtaccgtagtaaaggaaataacttcctataaaaagaagacagaagcattctcagaaccctcttcgtgatgtttgcattcaactcacagtgctgaacctttctttgatagttcagctttgaaacactctttttgtagaaactgcaagtggatatttggtcctctctgaggatttcgttggaaacgggataaactgcacagaactaaacagaagcattctcagaaccttcttcgtgatgtttgcattcaactcacagtgttgaacctttctttgatagctcaggtttgaaacggtctttctgtagaaactgcaagtagatatttggacctctctgaggatttcgttggaaacgggataacccgcacagaactaaaacagaagcattcacagaaaactcttggtgacgactgagtttaactcacagagctgaacattcctttggatggagcagtttcgaaacacactatttgtagaatgtgcaagtggatatttgggcctctctgaggatttcgttggaaacgggataaaccgcacagaactaaacagaagcattctcagaaactactttgtgatgattgcattcaagtcacagagttgaacattccctttgacagagcagtttggaaactctctttgtgtagaatctgcaagtggagatatggaccgctttgaggcctatggtagtaaaggaaatagcttcatataaaagctagacagtagcattctcagaaacttctttgtgatgcttgcattcaactcacagagttgaactttcctttcgagagagaagctttgaaacactctttttccagaatctgcaagtggacatttggagggctttgaggcctgtggtggaaaaggaattatcttcccgtaaaagctagatagaagcactgtcagaaacttctttgtgatgattgcattcaactcacagagttgaaggttccttttcaaacagcagtttccaatcactctttctgtggaatctgcaagtggatatttggacctattttgaagatttcgttggaaacgggataatcttcacagaaaagctaaacagaagcattctcagaaacttctctgtgatgtttgtgttcaactcccagagtttcacgttgcttttcatagagtagttctgaaacatgcttttcgtagtgtctgcaagtggacatttggagcgctttcaggcctgtggtggaaaacgaattatggtcacataaaaactggagagaagccttctcagaaacttctctgtgatgattgcattcaactcacagagttgaaccctcctatggatagagcagtgttgaaactctctttttgtggaatctgcaagtggatatgtggacctctccgaacatgtctttggaaacgggaatatcttcacataaaaactaaacagaagcattctcagaaacttcttggtgatgtttgcattcaaatcccagagttgaaccttcctttgatagttcaggtttgaaacactctttttgtaggatctgcaagtggctatttggaccactctgtggccttcgttcgaaacgggtatatcttcgcataaaatctagacagaagcattctcagaaaatactttgtgatgattgagtttaaatcacagagctgaacattcctttggatggagcaggtttgagacacactttttgtagaatctacaagtggatatttggacctctctgaggatttcgttggaaacgggataactgcacctaactaaacggaagcattctcagaaactgctttgtgatgattgcattcacctcacagagttgaacattcctattgatagagcagtttggaaacactcttgttgtggaatgtgcaagtggagatttggagcgctttgaggcctatggtagtaaagggaatagcttcatagaaaaactagacagatgcattctcaggaactttttggtgatgtttgtattcaactcccagagttgaactttcctttggaaagagcagctatgaaacactctttttctagaatctgcaagtggacgtttggagggctttgtggtttgtggtggaaaaggaaatatcttcacctaaatactagatagaagcattctcagaagcttctctgtgatgactgcattcaactcacggagttgaacactccttttgagagcgcagttttgaaactctctttctgtggcatctgcaaggggacatgtagacctctttgaagatttcgttggaaacggaatcatcttcacataaaaactatacagaagcagtctcagaatcttctttgtgatgtttgcattcaaatcccagagttgaactttcctttcgaagttcacgtttgaaacactctttttgcaggatctacaagtggatatttggaccactctgtgtccttcgtacgaaacgggtatatcttcacacgacatctagacagaagctttctcagaaaattctttgggatgattgagtggaactcacagagctgaacattccttgcgatgtagcagtttagaaacacactttctgcagaatctgcaagtgcatatttggacctctctgaggaattcgttggaaacgggataatttcagctgactaaacagaagcattctcagaaccttcttcgtgatgtctgcattcaactcacagtgtggaacctttctttgatagttcaggtttgaaacactctttttgtagaaactgcaaggggataattgcacttctttgaggcctaccgtagtaaaggaaataacttcctatagaaagaagacagaagcattctcagaaccctcttcgtgatgtttgcattcaactcacagtgctgaacctttctttgatagttcagctttgaaacactcttcttgtagaaactgcaagtggatatttggtcctctctgaggatttcgttggaaacgggataaaccgcacagaactaaacagaagaattctcagagccctcttcgtgatgtttgcattcaactcacaagtgctgaacctttctttgatagtgcagctttgaaacactctttttgtagaaactgcaagtggatgtttggtcctctctgaggatttcgttggaaacgggataaaccgcacagaactaaaacagaagcattgtcagaaacttctttgtgatgattgcattcaactcacagagttgaaggttccttttcaaacagcagtttccaatcactctttctgtggaatctgcaagtggatatttgggcctctctgaggatttcgttggaaacgggataaaacgcacagaactaaaacagaagcattctcagaaacttctctgtgatgtttgtgttcaactcccagagtttcacattgcttttcatagagtagttctgaaacatgcttttcgtagtgtctacaagtggacatttggagcgctttcaggcctgtggtggaaaacgaattatggtcacataaaaactggagagaagccttctcagaaacttctctgtgatgattgcattcaactcacagagttgaaccctccctatggatagagcagtgttgaaactctctttttgtggaatctgcaagtggatatgtggacctctccgaagatgtctttggaaacgggaatatcttcacataaaaactaaacagaagcattttcagaaacttcttggtgatgtttgcattcaaatcccagagttgaaccttcctttgatagttcaggtttgaaacactctttttgtaggatctgcaagtggctatttggaccactctgtggccttcgttcgaaacgggtatatcttcgcataaaatctagacagaagcattctcagaaaatactttgtgatgattgagtttaaatcacagagctgaccattcctttggatggagcaggtttgagacacactttttgtagaatctacaagtggatatttggacctctctgaggatttcgttggaaacgggataactgcacctaactaaacggaagcattctcagaaactgctttgtgatggttgcattcacctcacagagttgaacattcctattgatagagcagtttggaaacactcttgttgtggaatgtgcaagtggagatttggagcgctttgaggcctatggtagtaaagggaatagcttcatagaaaaactagacagatgcattctcaggaactttttggtgatgtttgtattcaactcccaagagttgaactttcctttggaaagagcagctatgaaacactctttttctagaatctgcaagtggacgtttggagggctttgtggtttgtggtggaaaaggaaatatcttcacctaaatactagatagaagcattctcagaagcttctctgtgatgactgcattcaactcacggagttgaacactccttttgagagcgcagttttgaaactctctttctgtggcatctgcaaggggacatgtagacctctttgaagatttcgttggaaacggaatcatcttcacataaaaactatacagaagcagtctcagaatcttctttgtgatgtttgcattcaaatcccagagttgaactttcctttcaaagttcacgtttgaaacactctttttgcaggatctacaagtggatatttggaccactctgtgtccttcgttcgaaacgggtatatcttcacacgacatctagacagaagctttctcagaaaattctttgggatgattgagtggaactcacagagctgaacattccttgcgatgtagcagtttagaaacacactttctgcagaatctgcaagtgcatatttggacctctctgaggaattcgttggaaacgggataatttcagctgactaaacagaagcattctcagaaccttcttcgtgatgtctgcattcaactcacagtgtggaacctttctttgatagttcaggtttgaaacactctttttgtagaaactgcaaggggataattgcacttctttgaggcctaccgtagtaaaggaaataacttcctatagaaagaagacagaagcattctcagaaccctcttcgtgatgtttgcattcaactcacagtgctgaacctttctttgatagttcagctttgaaacactcttcttgtagaaactgcaagtggatatttggtcctctctgaggatttcgttggaaacgggataaaccgcacagaactaaacagaagaattctcagagccctcttcgtgatgtttgcattcaactcacagtgctgaacctttctttgatagtgcagctttgaaacactctttttgtagaaactgcaagtggatgtttggtcctctctgaggatttcgttggaaacgggataaaccgcacagaactaaaacagaagcattgtcagaaacttctttgtgatgattgcattcaactcacagagttgaaggttccttttcaaacagcagtttccaatcactctttctgtggaatctgcaagtggatatttgggcctctctgaggatttcgttggaaacgggataaaacgcacagaactaaaacagaagcattctcagaaacttctctgtgatgtttgtgttcaactcccagagtttcacgttgcttttcatagagtagttctgaaacatgcttttcgtagtgtctgcaagtggacatttggagcgctttcaggcctgtggtggaaaacgaattatggtcacataaaaactggagagaagcattctcagaaaatactttgtgatgattgagtttaaatcacagagctgaccattcctttggatggagcaggtttgagacacactttttgtagaatctacaagtggatatttggacctctctgaggatttcgttggaaacgggataactgcacctaactaaacggaagcattctcagaaactgctttgtgatgattgcattcacctcacagagttgaacattcgtattgatagagcagtttggaaacactcttcttgtggaatgtgcaagtggagatttggagcgctttggggcctatggtagtaaagggaatagcttcatagaaaaactagacagatgcattctcaggaactttttggtgatgtttgtattcaactcccagagttgaactttcctttggaaagagcagctatgaaacactctttttctagaatctgcaagtggacgtttggagggctttgtggtttgtggtggaaaaggaaatatcttcacctaaatactagatagaagcattctcagaagcttctctgtgatgactgcattcaactcacggagttgaacactccttttgagagtgcagttttgaaactctctttctgtggcatctgcaaggggacatgtagacctctctgaagatttcgttggaaacggaatcatcttcacatacaaactatacagaagcagtctcagaatcttctttgtgatgtttgcattcaaatcccagagttgaactttcctttcaaagttcacgtttgaaacactctttttgcaggatctacaagtggatatttggaccactctgtgtccttcgttcgaaacgggtatatcttcacatgacatctagacagaagctttctcagaaaattctttgggatgattgagttgagcaaacagagctgaacactccttgcgatgtagcagtttagaaacaccctttctgcagaatctgcaagtgcatatgtggacctctctgaggaattcgttggaaacgggataatttcagctgactaaacagaagcattctcagaaccttcttcgtgatgtctgcattcaactcacagtgtggaacctttctttgatagttcaggtttgaaacactctttttgtagaaactgcaaggggatcattgcacttctttgaggcctaccgtagtaaaggaaataacttcctataaaaagaagacagaagcattctcagaaccctcttcgtgatgtttgcattcaactcacggtgctgaacctttctttgatagttcagctttgaaacactctttttgtagaaactgcaagtggatatttggtcctctctgaggatttcgttggaaacgggataaaccgcacagaactaaacagaagcattctcagaaccttcttcgtgatgtttgcattcaactcacagtgttgaacctttctttgatagttcaggtttgaaacggtctttctgtagaaactgcaagtagatatttggacctctctgaggatttcgttggaaacgggataaaccgcacagaactaaaacagaagcattcacagaaaactcttggtgacgactgagtttaacccacagagctgaacattcctttggatggagcagtttcgaaacacactatttgtagaatgtgcaagtggatatttgggcctctctgaggattttgttggaaacgggataaactgcccagaactaaacagaagcattctcagaaactactttgtgatgattgcattcaagtcacagagttgaacattccctttgacagagcagtttggaaactctctttgtgtagaatctgcaagtggagatatggaccgctttgaagcctatggtagtaaaggaaatagcttcatataaaagctagacagtagcattctcagaaacttctttgtgatgcttgcattcaactcacagagttgaactttcctttcgagagagaagctttgaaacactctttttccagaatctgcaagtggacctttggagggctttgaggcctgtggtggaaaaggaattaacttcccgtaaaagctagatagaagcattgtcagaaacttctttgtgatgattgcattcaactcacagagatgaaggttcctttacatacagcagtttccaaacaccctttctgtggaatctgcaagtggatatttggacctctttgaagatttcgttggaaacgggagaatcttcacagaaaagctaaacagaagcattctcagaaacttctctgtgatgtttgtgttcaactcccagagtttcacattgcttttcatagagtagttctgaaacatgcttttcgtagtgtctgcaagtggacatttggagcgctttcaggcctgtggtggaaaacgaattatggtcccataaaaactggagagaagccttctcagaaacttctctgtgatgattgcattcaactcacagatttgaaccctcctatggatagagcattgttgaaactctctttttgtggaatctgcaagtggatatgtggacctctccgaagatgtctttggaaacgggaatatcttcacataaaaactaaacagaagcattctcagaaacttcttggtgatgtttgcattcaaatcccagagttgaaccttcctgtgatagttcaggtttgaaacactctttttgtaggatctgcaagtggatatttggaccactctgtggccttcgtccgaaacgggtacatcttcacataaaatctagacagaagcattctcagaaaatactttgtgatgattgagtttaactcacggagctgaacattcctttggatggagcaggtttgagacacactttttgtagaatctacaagtggatattgggacctctctgaggatttcgttggaaacgcgataactgcacctaactaaacggaagcattctcagaaactgctttgtgatgattgcattcacctcacagagttgaacattcctattgatagagcagtttggaaacactcttgttgtggaatgtgcaagtggagatttggagcgctttgaggcctatggtagtaaaaggaatagcttcatagaaaaactagacagatgcattctcaggaactttttggtgatgtttgtattcaactcccagagttgaactttcctttggaaagagcagctatgaaacactctttttctagaatctgcaagtggacgtttggagggctttgtggtttgtggtggaaaaggaaatatcttcacctaaatactagatagaagcattctcagaagcttctctgtgatgactgcattcaactcacggagttgaacactccttttgagagcgcagttttgaaactctctttctgtggcatctgcaaggggacatgtagacctctttgaagatttcgttggaaacggaatcatcttcacataaaaactatacagaagcagtctcagaatcttctttgtgatgtttgcattcaaatcccagagttgaactttcctttcaaagttcacgtttgaaacactctttttgcaggatctacaagtggatatttggaccactctgtgtccttcgttcgaaacgggtatatcttcacacgacatctagacagaagctttctcagaaaattctttgggatgattgagtggaactcacagagctgaacattccttgcgatgtagcagtttagaaacacactttctgcagaatctgcaagtgcatatttggacctctctgaggaattcgttggaaacgggataatttcagctgactaaacagaagcattctcagaaccttcttcgtgatgtctgcattcaactcacagtgtggaacctttctttgatagttcaggtttgaaacactctttttgtagaaactgcaaggggataattgcacttctttgaggcctaccgtaataaaggaaataacttcctatagaaagaagacagaagcattctcagaatcctcttcgtgatgtttgcattcaactcacagtgctgaacctttctttgatagttcagctttgaaacactcttcttgtagaaactgcaagtggatatttcgtcctctctgaggatttcgttggaaacgggataaaccgcacagaactaaacagaagaattctcagagccctcttcgtgatgtttgcattcaactcacagtgctgaacctttctttgatagtgcagctttgaaacactctttttgtagaaactgcaagtggatatttggtcctctctgaggatttcgttggaaacgggataaaccgcacagaactaaaacagaagcattgtcagaaacttctttgtgatgattgcattcaactcacagagttgaaggttccttttcaaacagcagtttccaatcactctttctgtggaatctgcaagtggatatttgggcctctctgaggatttcgttggaaacgggataaaacgcacagaactaaaacagaagcattctcagaaacttctctgtgatgtttgtgttcaactcccagagtttcacgttgcttttcatagagtagttctgaaacatgcttttcgtagtgtctgcaagtggacatttggagcgctttcaggcctgtggtggaaaacgaattatggtcacataaaaactggagagaagccttctcagaaacttctctgtgatgattgcattcaactcacagagttgaaccctcctatggatagagcagtgttgaaactctctttttgtggaatctgcaagtggatatgtggacctctccgaagatgtctttggaaacgggaatatcttcacataaaaactaaacagaagcattctcagaaacttcttggtgatgtttgcattcaaatcccagagttgaaccttcctttgatagttcaggtttgaaacactctttctgtaggatctgcaagtggctatttggaccactctgtggccttcgttcgaaacgggtatatcttcgcataaaatctagacagaagcattctcagaaaatactttgtgatgattgagtttaaatcacagagctgaccattcctttggatggagcaggtttgagacacactttttgtagaatctacaagtggatatttggacctctctgaggatttcgttggaaacgggataactgcacctaactaaacggaagcattctcagaaactgctttgtgatgattgcattcacctcacagagttgaacattcctattgatagagcagtttggaaacactcttgttgtggaatgtgcaagtggagatttggagcgctttgaggcctatggtagtaaagggaatagcttcatagaaaaactagacagatgcattctcaggaactttttggtgatgtttgtattcaactcccagagttgaactttcctttggaaagagcagctatgaaacactctttttctagaatctgcaagtggacgtttggagggctttgtggtttgtggtggaaaaggaaatatcttcacctaaatactagatagaagcattctcagaagcttctctgtgatgactgcattcaactcacggagttgaacactccttttgagagcgcagttttgaaactctctttctgtggcatctgcaaggggacatgtagacctctttgaagatttcgttggaaacggaatcatcttcacataaaaactatacagaagcagtctcagaatcttctttgtgatgtttgcattcaaatcccagagttgaactttcctttcaaagttcacgtttgaaacactctttttgcaggatctacaagtggatatttggaccactctgtgtccttcgttcgaaacgggtatatcttcacacgacatctagacagaagctttctcagaaaattctttgggatgattgagtggaactcacagagctgaacattccttgcgatgtagcagtttagaaacacactttctgcagaatctgcaagtgcatatttggacctctctgaggaattcgttggaaacgggataatttcagctgactaaacagaagcattctcagaaccttcttcgtgatgtctgcattcaactcacagtgtggaacctttctttgatagttcaggtttgaaacactctttttgtagaaactgcaaggggataattgcacttctttgaggcctaccgtagtaaaggaaataacttcctatagaaagaagacagaagcattctcagaaccctcttcgtgatgtttgcattcaactcacagtgctgaacctttctttgatagttcagctttgaaacactcttcttgtagaaactgcaagtggatatttggtcctctctgaggatttcgttggaaacgggataaaccgcacagaactaaacagaagaattctcagagccctcttcgtgatgtttgcattcaactcacagtgctgaacctttctttgatagtgcagctttgaaacactctttttgtagaaactgcaagtggatgtttggtcctctctgaggatttcgttggaaacgggataaaccgcacagaactaaaacagaagcattgtcagaaacttctttgtgatgattgcattcaactcacagagttgaaggttccttttcaaacagcagtttccaatcactctttctgtggaatctgcaagtggatatttgggcctctctgaggatttcgttggaaacgggataaaacgcacagaactaaaacagaagcattctcagaaacttctctgtgatgtttgtgttcaactcccagagtttcacgttgcttttcatagagtagttctgaaacatgcttttcgtagtgtctgcaagtggacatttggagcgctttcaggcctgtggtggaaaacgaattatggtcacataaaaactggagagaagccttctcagaaacttctctgtgatgattgcattcaactcacagagttgaaccctcctatggatagagcagtgttgaaactctctttttgtggaatctgcaagtggatatgtggacctctccgaagatgtctttggaaacgggaatatcttcacataaaaactaaacagaagcattctcagaaacttcttggtgatgtttgcattcaaatcccagagttgaaccttcctttgatagttcaggtttgaaacactctttttgtaggatctgcaagtggctatttggaccactctgtggccttcgttcgaaacgggtatatcttcgcataaaatctagacagaagcattctcagaaaatactttgtgatgattgagtttaaatcacagagctgaccattcctttggatggagcaggtttgagacacactttttgtagaatctacaagtggatatttggacctctctgaggatttcgttggaaacgggataactgcacctaactaaacggaagcattctcagaaactgctttgtgatgattgcattcacctcacagagttgaacattcctattgatagagcagtttggaaacactcttgttgtggaatgtgcaagtggagatttggagcgctttgaggcctatggtagtaaagggaatagcttcatagaaaaactagacagatgcattctcaggaactttttggtgatgtttgtattcaactcccagagttgaactttcctttggaaagagcagctatgaaacactctttttctagaatctgcaagtggacgtttggagggctttgtggtttgtggtggaaaaggaaatatcttcacctaaatactagatagaagcatcctcagaagcttctctgtgatgactgcattcaactcacggagttgaacactccttttgagagcgcagttttgaaactctctttctgtggcatctgcaaggggacatgtagacctctttgaagatttctttggaaacggaatcatcttcacataaaaactatacagaagcagtctcagaatcttctttgtgatgtttgcattcaaatcccagagttgaactttcctttcaaagttcacgtttgaaacactctttttgcaggatctacaagtggatatttggaccactctgtgtccttcgttcgaaacgggtatatcttcacacgacatctagacagaagctttctcagaaaattctttgggatgattgagtggaactcacagagctgaacattccttgcgatgtagcagtttagaaacacactttctgcagaatctgcaagtgcatatttggacctctctgaggaattcgttggaaacgggataatttcagctgactaaacagaagcattctcagaaccttcttcgtgatgtctgcattcaactcacagtgtggaacctttctttgatagttcaggtttgaaacactctttttgtagaaactgcaaggggataattgcacttctttgaggcctaccgtagtaaaggaaataacttcctatagaaagaagacagaagcattctcagaaccctcttcgtgatgtttgcattcaactcacagtgctgaacctttctttgatagttcagctttgaaacactcttcttgtagaaactgcaagtggatatttggtcctctctgaggatttcgttggaaacgggataaaccgcacagaactaaacagaagaattctcagagccctcttcgtgatgtttgcattcaactcacagtgctgaacctttctttgatagtgcagctttgaaacactctttttgtagaaactgcaagtggatgtttggtcctctctgaggatttcgttggaaacgggataaaccgcacagaactaaaacagaagcattgtcagaaacttctttgtgatgattgcattcaactcacagagttgaaggttccttttcaaacagcagtttccaatcactctttctgtggaatctgcaagtggatatttgggcctctctgaggatttcgttggaaacgggataaaacgcacagaactaaaacagaagcattctcagaaacttctctgtgatgtttgtgttcaactcccagagtttcacgttgcttttcatagagtagttctgaaacatgcttttcgtagtgtctgcaagtggacatttggagcgctttcaggcctgtggtggaaaacgaattatggtcacataaaaactggagagaagccttctcagaaacttctctgtgatgattgcattcaactcacagagttgaaccctcctatggatagagcagtgttgaaactctctttttgtggaatctgcaagtggatatgtggacctctccgaagatgtctttggaaacgggaatatcttcacataaaaactaaacagaagcattctcagaaacttcttggtgatgtttgcattcaaatcccagagttgaaccttcctttgatagttcaggtttgaaacactctttctgtaggatctgcaagtggctatttggaccactctgtggccttcgttcgaaacgggtatatcttcgcataaaatctagacagaagcattctcagaaaatactttgtgatgattgagtttaactcacagagctgaacattcctttggatggagcaggcttgagacacactttttgtagaatctacaagtggatatttggacctctctgaggatttcgttggaaacgggataactgcacctaactaagtggaagcattctcagaaactgctttgtgatgattgcattcacctcacagagttgaccattcctattgatagagcagtttggaaacactcttgttgtggaatgtgcaagtggagatttggagcgctttgaggcctatggtagtaaagggaatagcttcatagaaaaactagacagatgcattctcaggaactttttggtgatgtttgtattcaactcccagagttgaactttcctttggaaagagcagctatgaaacaccctttttctagaatctgcaagtggacgtttggagggctttgtggtttgtggtggaaaaggaaatatcttcacctaaatactagatagaagcattctcagaagcttctctgtgatgactgcattcaactcacggagttgaacactccttttgagagcgcagttttgaaactctctttctgtggcatctgcaaggggacatgtagacctctttgaagatttcgttggaaacggaatcatcttcacataaaaactatacagaagcagtctcagaatcttctttgtgatgtttgcattcaaatcccagagttgaactttcctttcaaagttcacgtttgaaacactctttttgcaggatctacaagtggatatttggaccactctgtgtccttcgttcgaaacgggtatatcttcacacgacatctagacagaagctttctcagaaaattctttgggatgattgagtggaactcacagagctgaacattccttgcgatgtagcagtttagaaacacactttctgcagaatctgcaagtgcatatttggacctctctgaggaattcgttggaaacgggataatttcagctgactaaacagaagcattctcagaacctccttcgtgatgtctgcattcaactcacagtgtggaacctttctttgatagttcaggtttgaaacactctttttgtagaaactgcaaggggataattgcacttctttgaggcctaccgtagtaaaggaaataacttcctataaaaagaagacagaagcattctcagaaccctcttcgtgatgtttgcattcaactcacagtgctgaacctttctttgatagttcagctttgaaacactcttcttgtagaaactgcaagtggatatttggtcctctctgaggatttcgttggaaacgggataaaacgcacagaactaaacagaagaattctcagagccctcttcgtgatgtttgcattcaactcacagtgctgaacctttctttgatagtgcagctttgaaacactctttttgtagaaactgcaagtggatatttggtcctctctgaggatttcgttggaaacgggataaaccgcacagaactaaaacagaagcattcacagaaaactcttggtgacgactgaatttaactcacagagctgaacattcctttggatggagcagtttcgaaacacactatttgtagaatctgcaagtggatatttgggcctctctgaggatttcgttggaaacgggataaaacgcacagaactaaaacagaagcattctcagaaactaatttgtgatgattgcattcaagtcacagagttgaacattccctttgacagagcagtttggaaactctctttgtgtagaatctgcaagtggagatatggaccgctttgaggcctatggtagtaaaggaaagagcttcatataaaagctagacagtagcattctcagaaacttctttgtgatgcttgcattcaactcacagagttgaactttcctttcgagagagaagctttgaaacactctttttccagaatgtgcaagtggacatttggagggctttgaggcctgtggtggaaaaggaattatcttcccgtaaaagctagatagaagcattgtcagaaacttctttgtgatgattgcattcaactcacagagttgaaggttccttttcaaacagcagtttccaatcactctttctgtggaatctgcaagtggatatttggacctattttgaagatttcgttggaaacgggataatcttcacagaaaagctaaacagaagcattctcagaaacttctctgtgatgtttgtgttcaactcccagagtttcacattgcttttcatagagtagttctgaaacatgcttttcgtagtgtctgcaagtggacatttggagcgctttcaggcctgtggtggaaaacgaattatggtcacatagaaactggagagaagccttctcagaaacttctctgtgatgattgcattcaactcacagagttgaaccctcctatggatagagcagtgttgaaactctctttttgtggaatctgcaagtggatatgtggacctctccgaagatgtctttggaaacgggaatatcttcacataaaaactaaacagaagcattctcagaaacttcttggtgatgtttgcattcaaatcccagagttgaaccttcctttgagagttcaggtttgaaacactctttttgtaggatctgcaagtggatatttggaccactctgtggccttcgttcgaaacgggtacatcttcgcataaaatctagacagaagcattctcagaaaatactttgtgatgattgagttgaactcacagagctgaacattcctttggatggagcaggtttgagacacactttttgtagaatctacaagtggatatttggacctctctgaggatttcgttggaaacgggataactgcacctaactaaacggaagcattctcagaaactgctttgtgatgattgcattcacctcacagagttgaacattcctattgatagagcagtttggaaacactcttgttgtggaatgtgcaagtggagatttggagcgctttgaggtctatggtagtaaagggaatagcttcatagaaaaactagacagatgcattctcaggaactttttggtgatgtttgtattcaactcccagagttgaactttcctttggaaagagcagctatgaaacactctttttctagaatctgcaagtggacgtttggagggctttgtggtttgtggtggaaaaggaaatatcttcacctaaatactagagagaagcattctcagaagcttctctgtgatgactgcattcaactcacggagttgaacactccttttgagagcgcagttttgaaactctctttctgtggcatctgcaaggggacatgtagacctctttgaagatttcgttggaaacggaatcatcttcacataaaaactatacagaagcagtctcagaatcttctttgtgatgtttgcattcaaatcccagagttgaactttcctttcaaagttcacgtttgaaacactctttttgcaggatctacaagtggatatttggaccactctgtgtccttcgttcgaaacgggtatatcttcacatgacatctagacagaagctttctcagaaaattctttgggatgattgagtggaactcacagagctgaacattccttgcgatgtagcagtttagaaacacactttctgcagaatctgcaagtgcatatttggacctctctgaggaattcgttggaaacgggataatttcagctgactaaacagaagcattctcagaaccttcttcgtgatgtctgcaatcaactcacagtgtggaacctttctttgatagttcaggtttgaaacactctttttgtagaaactgcaaggggataattgcacttctttgaggcctaccgtagtaaaggaaataacttcctatagaaagaagacagaagcattctcagaaccctcttcgtgatgtctgcattcaactcacagtgctgaacctttctttgatagttcagctttgaaacactcttcttgtagaaactgcaagtggatatttggtcctctctgaggatttcgttggaaacgggataaaccgcacagaactaaacagaagcattctcagaaccttcttcgtgatgtttgcattcaactcacagtgttgaacctttctttgatagttcaggtttgaaacggtctttctgtagaaactgcaagtagatatttggacctctctgaggatttcgttggaaacgggataacccgcacagaactaaaacagaagcattcacagaaaactcttggtgacgactgagtttaactcacagagctgaacattcctttggatggagcagtttcgaaacacactatttgttgaatgtgcaagtggatatttgggcctctctgaggatttcgttggaaacgggataaaccgcacagaactaaacagaagcattctcagaaactactttgtgatgattgcattcaagtcacagagttgaacattccctttgacagagcagtttggaaactctctttctgtagaatctgcaagtggagatatggaccgctttgaggcctatggtagtaaaggaaatagcttcatataaaagctagacagtagcattctcagaaacttctttgtgatgcttgcattcaactcacagagttgaactttcctttcgagagagaagctttgaaacactctttttccagaatctgcaagtggacatttggagggctttgaggcctgtggtggaaaagtaattaacttcccgtaaaagctagatagaagcattgtcagaaacttctttgtgatgattgcattcaactcacagagttgaaggttccttttcaaacagcagtttccaatcactctttctgtggaatctgcaagtggatatttgggcctctctgaggatttcgttggaaacgggataaaacgcacagaactaaaacagaagcattctcagaaacttctctgtgatgtttgtgttcaactcccaagagtttcacattgcttttcatagagtagttctgaaacatgcttttcgtagtgtctacaagtggacatttggagcgctttcaggcctgtggtggaaaacgaattatggtcacataaaaactggagagaagccttctcagaaacttctctgtgatgattgcattcaactcacagagttgaaccctcctatggatagagcagtgttgaaactctctttttgtggaatctgcaagtggatatgtggacctctccgaagatgtctttggaaacgggaatatcttcacataaaaactaaacagaagcattctcaggaaacttcttggtgatgtttgcattcaaatcccagagttgaaccttcctttgatagttcaggtttgaaacactctttttgtaggatctgcaagtggctatttggaccactctgtggccttcgttcgaaacgggtatatcttcgcataaaatctagacagaagcattctcagaaaatactttctgatgattgagtttaactcacagagctgaacattcctttggatggagcaggtttgagaaacactttttgtagaatctacaagtggatatttggacctctctgaggatttcgttggaaacgggataactgcacctaactaaacggaagcattctcagaaactactttgtgatgattgcattcacctcacagagttgaacattcctattgatagagcagtttggaaacactcttgttgtggaatgtgcaagtggagatttggagcgctttgaggcctatggtagtaaagggaatagctttatagaaaaactagacagatgcattctcaggaactttttggtgatgtttgtattcaactcccagagttgaactttcctttggaaagagcagctatgacacactctttttctagaatctgcaagtggacgtttggagggctttgtggtttgtggtggaaaaggaaatatcttcacctaaatactagatagaagcattctcagaagcttctctgtgatgactgcattcaactcacggagttgaacactccttttgagagcgcagttttgaaactctctttctgtggcatctgcaaggggacatgtagacctctttgaagatttcgttggaaacggaatcatcttcacataaaaactatacagaagcagtctcagaatcttctttgtgatgtttgcattcaaatccccgagttgaactttcctttcaaagttcacgtttgaaacactctttttgcaggatctacaagtggatatttggaccactctgtgtccttcgttcgaaacgggtatatcttcacatgacatctagacagaagctttctcagaaaattctttgggatgattgagttgaactcacagagctgagcattccttgcgatgtagcagtttagaaacacactttctgcagaatctgcaagtgcatatttggacctctgtgaggaattcgttggaaacgggataatttcagctgactaaacagaagcattctcagaaccttcttcatgatgtctgcattcaactcacagtgtggaacctttctttgatagttcaggtttgaaacactctttttgtagaaactgcaaggggataattgcactctttgaggagtaccgtagtaaaggaaataacttcctataaaaagaagacagaagcattctcagaaccctcttcgtgatgtttgcattcaactcacagtgctgaacctttctttgatagttcagctttgaaacactctttttgtagaaactgcaagtggatatttggtcctctctgagcatttcgttggaaacgggataaactgcacagaactaaacagaagcattctcagaacttcttcgtgatgtttgcattcaactcacagtgttgaacctttctttgatagttcaggtttgaaacggtctttctgtagaaactgcaagtagatatttggacctctctgaggatttcgttggaaacgggataacccgcacagaactaaaacagatagcattcacagtaaaactcttggtgacgactgagtttaactcacagagctgaacattcctttggatggagcagtttcgaaacacactatttgtagaatgtgcaagtggatatttgggcctctctgaggatttcgctggaaacgggataaaccgcacagaactaaacagaagcattctcagaaactactttgtgatgattgcattcaagtcacagagttgaacattccctttgacagagcagtttggaaactctctttctgtagaatctgcaagtggagatatggaccgctttgaggcctatggtagtaaaggaaatagcttcatataaaagctagacagtagcattctcagaaacttctttgtgatgcttgcactcaactcacagagttgaactttcctttcgagagagaagctttgaaacactctttttccagaatctgcaagtggacatttggagggctttgaggcctgtggtggaaaaggaattaacttcccgtaaaagctagatagaagcattgtcagaaacttctttgtgatgattgcattcaactcacagagatgaaggttcctttacaaacagcagtttccaaacactctttctgtggaatctgcaagtggatatttggacctctttgaagatttcgttggaaacgggagaatcttcacagaaaagctaaacagaagcattctcagaaacttctctgtgatgtttgtgttcaactcccagagtttcacattgcttttcatagagtagttctgaaacatgcttttcgtagtgtctgcaagtggacatttggagcgctttcaggcctgtggtggaaaacgaattatggtcccataaaaactggagagaagccttctcagaaacttctctgtgatgattgcattcaactcacagagttgaaccctccctatggatagagcagtgttgaaactctctttttgtggaatctgcaagtggatatgtggacctctccgaagatgtctttggaaacgggaatatcttcacataaaaactaaacagaagcattctcagaaacttcttggtgatgtttgcattcaaatcccagagttgaaccttcctttgatagttcaggtttgaaacactctttttgtaggatctgcaagtggctatttggaccactctgtggccttcgttcgaaacgggtatatcttcgcataaaatctagacagaagcattctcagaaaatactttgtgatgattgagttaaaatcacagagctgaacattcctttggatggagcaggtttgagacacactttttgtagaatctacaagtggatatttggacctctctgaggatttcgttggaaacgggataactgcacctaactaaacggaagcattctcagaaactgctttgtgatgattgcattcacctcacagagttgaacattcctattgatagagcagtttggaaacactcttgttgcggaatgtgcaagtggagatttggagcgctttgaggcctgtggtagtaaagggaatagcttcatagaaaaactagacagatgcattctcaggaactttttggtgatgtttgtattcaactcccagagttgaactttcctttggaaagagcagctatgaaacactctttttctagaatctgcaagtggacgtttggagggctttgtggtttgtggtggaaaaggaaatatcttcacctaaatactagatagaagcattctcagaagcttctctgtgatgactgcattcaactcacggagttgaacactccttttgagagcgcagttttgaaactctctttctgtggcatctgcaaggggacatgtagacctctttgaagatttcgttggaaacggaatcatcttcacataaaaactatacagaagcagtctcagaatcttctttgtgatgtttgcattcaaatcccagagttgaactttcctttcaaagttcacgtttgaaacactctttttgcaggatctacaagtggatatttggaccactctgtgtccttcgttcgaaacgggtatatcttcacacgacatctagacagaagctttctcagaaaattctttgggatgattgagtggaactcacagagctgaacattccttgcgatgtagcagtttagaaacacactttctgcagaatctgcaagtgcatatttggacctctctgaggaattcgttggaaacgggataatttcagctgactaaacagaaagcattctcaggaaccttcttcgtgatgtctgcattcaactcacagtgtggaacctttctttgatagttcaggtttgaaacactctttttgtagaaactgcaaggggataattgcacttctttgaggcctaccgtagtaaaggaaataacttcctatagaaagaagacagaagcattctcagaaccctcttcgtgatgtttgcattcaactcacagtgctgaacctttctttgatagttcagctttgaaacactcttcttgtagaaactgcaagtggatatttggtcctctctgaggatttcgttggaaacgggataaaccgcacagaactaaacagaagcattctcagagccctcttcgtgatgtttgcattcaactcacagtgctgaacctttctttgatagtgcagctttgaaacactctttttgtagaaactgcaagtggatatttggtcctctctgaggatttcgttggaaacgggataaaccgcacagaactaaaacagaagcattgtcagaaacttctttgtgatgattgcattcaactcacagagttgaaggttccttttcaaacagcagtttccaatcactctttctgtggaatctgcaagtggatatttgggcctctctgaggatttcgttggaaacgggataaaacgcacagaactaaaacagaagcattctcagaaacttctccgtgatgtttgtgttcaactcccagagtttcacgttgcttttcatagagtagttctgaaacatgcttttcgtagtgtctgcaagtggacatttggagcgctttcaggcctgtggtggaaaacgaattatggtcacataaaaactggagagaagccttctcagaaacttctctgtgatgattgcattcaactcacagagttgaaccctcctatggatagagcagtgttgaaactctctttttgtggaatctgcaagtggatatgtggacctctccgaagatgtctttggaaacgggaatatcttcacataaaaactaaacagaagcattctcagaaacttcttggtgatgtttgcattcaaatcccagagttgaaccttcctttgatagttcaggtttgaaacactctttctgtaggatctgcaagtggctatttggaccactctgtggccttcgttcgaaacgggtatatcttcgcataaaatctagacagaagcattctcagaaaatactttgtgatgattgagtttaaatcacagagctgaccattcctttggatggagcaggtttgagacacactttttgtagaatctacaagtggatatttggacctctctgaggatttcgttggaaacgggataactgcacctaactaaacggaagcattctcagaaactgctttgtgatgattgcattcacctcacagagttgaacattcctattgatagagcagtttggaaacactcttgttgtggaatgtgcaagtggagatttggagcgctttgaggcctgtggtagtaaagggaatagcttcatagaaaaactagacagatgcattctcaggaactttttggtgatgtttgtattcaactcccagagttgaactttcctttggaaagagcagctatgaaacactctttttctagaatctgcaagtggacgtttggagggctttgtggtttgtggtggaaaaggaaatatcttcacctaaatactagacagaagcattctcagaagcttctctgtgatgactgcattcaactcacggagttgaacactccttttgagagcgcagttttgaaactctctttctgtggcatctgcaaggggacatgtagacctctttgaagatttcgttggaaacggaatcatcttcacataaaaactatacagaagcagtctcagaatcttctttgtgatgtttgcattcaaatcccagagttgaactttcctttcaaagttcacgtttgaaacactctttttgcaggatcttcaagtggatatttggaccactctgtgtccttcgttcgaaacgggtatatcttcacatgacatctagacagaagctttctcagaaaattctttgggatgattgagttgaactcacagagctgaacattccttgcgatggagcagtttagaaacacactttctgcagaatctgcaagtgcatatttggacctctctgaggaattcgttggaaacgggataatttcagctgactaaacagaagcattctcagaaccttcttcgtgatgtctgcattcaactcacagtgtggaacctttctttgatagttcaggtttgaaacactctttttgtagaaactgcaaggggataattgcacttctttgaggcctatcgtagtaaaggaaataacttcctataaaaagaagacagaagcattcacagaaaactcttggtgacgactgagtttaactcacagagctgaacattcctttggatttagcagtttcgaaacacactatttgtagaatctgcaagtggatatttggtcctctctgaggatttcgttggaaacgggataaaccgcacagaactaaacagaaccattctgagaaactactttgtgatgattgcattcaagtcacagagctgaacattccctttgacagagcagtttggaaactctctttgtgtagaatctgcaagtggagatatggaatgctttgaggactatggtagtaaaggaaatagcttcatataaaagctagacagtagcattctcagaaacttctttgtgatgcttgcattcaactaacagagttgaactttcctttcgagagagaagctttgaaacactctttttccagaatctgcaagtggacatttggagggctttgaggcctgtggtggaaaaggaattatcttcccgtaaaagctggatagaagcattgtcagaaacttctttgtgatgattgcattcaactcacagagttgaaggttccttttcaaacagcagtttccaaacactctttctgtggaatctgcaagtggatatttggacctctttgaagatttcgttggaaacgggatagccttcacagaaaagctaaacagaagcattctcagaaacttctctgtgatgtttgtgttcaactcccagagtgtcacattgcttctcatagagtagttctgaaacatgcttttcgtagtgcctgcaaggggacatttggagcgctttcaggcctgtggtggaaaacgaattatggtcacataaaaactggagagaagccttctcagaaacttctctgtgatgattgcattcaactcacagagttgaaccctcctatggatagagcagtgttgaaactctctttttgtggaatctgcaagtggatatgtggacctctccgaagatgtctttggaaacgggactatcttcacataaaaactaaacagaagcattctcagaaacttcttggtgatgtttgcattcaaatcccagagttgaaccttcctttgatagttcaggtttgaaacactctttttgtaggatctgcaagtggatatttggaccactctgtggccttcgttcgaaacgggtacatcttcgcataaaatctagacagaagcattctcagaaaatactttgtgatgattgagtttaactcacagagctgaacattcctttggatggagcaggtttgagacacactttttgtagaatccacaagtggatatttggacctctctgaggatttcgttggaaacgggataactgcacctaactaaacggaagcattctcagaaactgctttgtgatgattgcattcacctcacagagttgaacattcctattgatagagcagtttggaaacactcttgttgtggaatgtgcaagtggagatttggagcgctttgaggcctatggtagtaaagggaatagcttcatagaaaaactagacagatgcattctcaggaactttttggtgatgtttgtattcaactcccagagttgaactttcctttggaaagagcagctatgaagcactctttttctagaatctgcaagtggacgtttggagggctttgtggtttgtggtggaaaaggaaatatcttcacctaaatactagagagaagcattctcagaagcttctctgtgatgactgcattcaactcacggagttgaacactccttttgagagcgcagttttgaaactctctttctgtggcatctgcaaggggacatgtagacctctttgaagatttcgttggaaacggaatcatcttcacataaaaactatacagaagcagtctcagaatcttctttgtgatgtttgcattcaaatcccagagttgaactttcctttcaaagttcacgtttgaaacactctttttgcaggatctacaagtggatatttggaccactctgtgtccttcgttcgaaacgggtatatcttcacatgacatctagacagaagctttctcagaaaattctttgggatgattgagtggaactcacagagctgaacattccttgcgatggagcagtttagaaacacactttctgcagaatctgcaagtgcatatttggacctctctgaggaattcgttggaaacgggataatttcagctgactaaacagaagcattctcagaaccttcttcgtgatgtctgcattcaactcacagtgtggaacctttctttgatagttcaggtttgaaacactctttttgtagaaactgcaaggggataattgcacttctttgaggcctaccgtagtaaaggaaataacttcctatagaaagaagacagaagcattctcagagccctcttcgtgatgtttgcattcaactcacagtgctgaacctttctttgatagttcagctttgaaacactcttcttgtagaaactgcaagtggatatttggtcctctctgaggatttcgttggaaacgggataaaccgcacagaactaaacagaagcattgtcagaaacttctttgtgatgattgcattcaactcacagagttgaaggttccttttcaaacagcagtttccaatcactctttctgtggaatctgcaagtggatatttgggcctctctgaggatttcgttggaaacgggataaaacgcacagaactaaaacagaagcattctcagaaacttctctgtgatgtttgtgttcaactcccagagtttcacgttgcttttcatagagtagttctgaaacatgcttttcgtagtgtctgcaagtggacatttggagcgctttcaggcctgtggtggaaaacgaattatggtcacataaaaactggagagaagccttctcagaaacttctctgtgatgattgcattcaactcacagagttgaaccctcctatggatagagcagtgttgaaactctctttttgtggaatctgcaagtggatatgtggacctctccgaagatgtctttggaaacgggaatatcttcacataaaaactaaacagaagcattctcaggaaacttcttggtgatgtttgcattcaaatcccagagttgaaccttcctttgatagttcaggtttgaaacactctttttgtaggatctgcaagtggctatttggaccactctgtggccttcgttcgaaacgggtatatcttcgcataaaatctagacagaagcattctcaggaaaatactttgtgatgattgagtttaaatcacagagctgaccattcctttggatggagcaggtttgagacacactttttgtagaatctacaagtggatatttggacctctctgaggatttcgttggaaacgggataactgcacctaactaaacggaagcattctcagaaactgctttgtgatgattgcattcacctcacagagttgaacattcctattgatagagcagtttggaaacactcttgttgtggaatgtgcaagtggagatttggagcgctttgaggcctgtggtagtaaagggaatagcttcatagaaaaactagacagatgcattctcaggaactttttggtgatgtttgtattcaactcccagagttgaactttcctttggaaagagcagctatgaaacactctttttctagaatctgcaagtggacgtttggagggctttgtggtttgtggtggaaaaggaaatatcttcacctaaatactagatagaagcattctcagaagcttctctgtgatgactgcattcaactcacggagttgaacactccttttgagagcgcagttttgaaactctctttctgtggcatctgcaaggggacatgtagacctctttgaagatttcgttggaaacggaatcatcttcacataaaaactatacagaagcagtctcagaatcttctttgtgatgtttgcattcaaatcccagagttgaactttcctttcaaagttcacgtttgaaacactctttttgcaggatctacaagtggatatttggaccactctgtgtccttcgttcgaaacgggtatatcttcacacgacatctagacagaagcattctcagaatcttcttcgtgatgattgcattcaactcacagtgttgaacctttctttgatagttcaggttggaaacggtctttctgtagaaactgcaagtagatatttggacctcctctgaggatttcgttggaaacgggataaaccgcacagaactaaaacagaagcattcacagaaaactcttggtgacgactgagtttaactcacagagctgaacattcctttggatggagcagtttcgaaacacactatttgtagaatctgcaagtggatatttgggcctctctgaggatttcgttggaaacgggataaaccgcacagaactaaaacagaagcattctcagaaacaactttgtgatgattgcattcaagtcacagagttgaacattccctttgacagagcagtttggaaactctctttgtgtagaatctgcaagtggagatatggaccgctttgaggcctatggtagtaaaggaaatagcttcatataaaagctagacagtagcattctcagaaacttctttgtgatgcttgcattcaactcacagagttgaactttcctttcgagagagaagctttgaaacactctttttccagaatgtgcaagtggacatttggagggctttgaggcctgtggtggaaaaggaattatcttcccgtaaaagctagatagaagcattgtcagaaacttctttgtgatgattgcattcaactcacagagttgaaggttccttttcaaagagcagtttccaatcactctttctgtggaatctgcaagtggatatttcgacctattttgaagatttcgttggaaacgggataatcttcacagaaaagctaaacagaagcattctcagaaacttctctgtgatgtttgtgttcaactcccagagtttcacattgcttttcatagagtagttctgaaacatgcttttcgtagtgtctacaagtggacatttggagcgcttccaggcctgtggtggaaaacgaattatggtcacataaaaactggagagaagccttctcagaaacttctctgtgatgattgcattcaactcacagagttgaaccctcctatggatagagcagtgttgaaactctctttttgtggaatctgcaagtggatatgtggacctctccgaagatgtctttggaaacgggaatatcttcacataaaaactaaacagaagcattctcagaaacttcttggtgatgtttgcattcaaatcccagagttgaaccttcctttgatagttcaggtttgaaacactctttctgtaggatctgcaagtggctatttggaccactctgtggccttcgttcgaaacgggtatatcttcgcataaaatctagacagaagcattctcagaaaatactttgtgatgattgagtttaaatcacagagctgaccattcctttggatggagcaggtttgagacacactttttgtagaatctacaagtggatatttggacctctctgaggatttcgttggaaacgggataactgcacctaactaaacggaagcattctcagaaactgctttgtgatgattgcattcacctcacagagttgaacattcctattgatagagcagtttggaaacactcttgttgtggaatgtgcaagtggagatttggagcgctttgaggcctatggtagtaaagggaatagcttcatagaaaaactagacaggatgcattctcaggaactttttggtgatgtttgtattcaactcccagagttgaactttcctttggaaagagcagctatgaaacactctttttctagaatctgaaagtggacgtttggagagctttgtggtttgtggtggaaaaggaaatatcttcacctaaatactacatagaagcattctcagaagcttctctgtgatgactgcattcaactcacggagttgaacactccttttgagagcgtagttttgaaactctctttctgtggcatctgcaaggggacatgtagacctctttgaagatttcgttggaaacggaatcatcttcacataaaaactatacagaagcagtctcagaatcttctttgtgatgtttgcattcaaatcccagagttgaacttccctttcaaagttcacgtttgaaacactctttttgcaggatctacaagtggatatttggaccactctgtgtccttcgttcgaaacgggtatatcttcacatgacatctagacagaagctttctcagaaaattctttgggatgattgagttgaactcacagagctgagcattccttgcgatgtagcagtttagaaacacactttctgcagaatctgcaagtgcatatttggacctctgtgaggaattcgttggaaacgggataatttcagctgactaaacagaagcattctcagaaccttcttcgtgatgtctgcattcaactcacagtgtggaacctttctttgatagttcaggtttgaaacactctttttgtagaaactgcaaggggataattgcacttctttgaggcctaccgtagtaaaggaaataacttcctatagaaagaagacagaagcattctcagaaccctcttcgtgatgtttgcattcaactcacagtgctgaacctttctttgatagttcagctttgaaacactcttcttgtagaaactgcaagtggatatttggtcctctctgaggatttcgttggaaacgggataaaccacacagaactaaacagaagcattctcagaaccttcttcgtgatgtttgcattcaactcacagtgttgaacctttctttgatagttcaggttggaaacggtctttctgtagaaactgcaagtagatatttggacctctctgaggatttcgttggaaacgggataaaccgcacagaactaaaacagaagcattcacagaaaactcttggtgacgactgagtttaactcacagagctgaacattcctttggatggagcagtttcaaaacacactatttgtagaatgtgcaagtggatatttgggcctctctgaggatttcgttggaaaagggataaaccgcacagaactaaacagaagcattctcagaaactactttgtgatgattgcattcaagtcacagagttgaacattccctttgacagggcagtttggaaactctctttgtgtagaatctgcaagtggagacatggaccgctttgaggcctatggtagtaaagtaaatagcttcatataaaagctagacagtagcattctcagaaacttctttgtgatgcttgcattcaactcacagagttgaactttcctttcgagagagaagctttgaaacactctttttccagaatctgcaagtggacatttggagggctttgaggcctgtggtggaaaaggaattaacttcccgtaaaagctagatagaagcattgtcagaaacttctttgtgatgattgcattcaactcacggagatgaaggttcctttacaaacagcagtttccaaacactctttctgtggaatctgcaagtggatatttggacctctttgaagatttcgttggaaacgggagaatcttcacagaaaagctaaacagaagcattctcagaaacttctctgtgatgtttgtgttcaactcccagagtttcacgttgcttttcatagagtagttctgaaacatgcttttcgtagtgtctgcaagtggacatttggagcgctttcaggcctgtggtggaaaacgaattatggtcacataaaaactggagagaagccttctcagaaacttctctgtgatgattgcattcaactcacagagttgaaccctcctatggatagagcagtgttgaaactctctttttgtggaatctgcaagtggatatgtggacctctccgaagatgtctttggaaacgggaatatcttcacataaaaactaaacagaagcattctcagaaacttcttggtgatgtttgcattcaaatcccagagttgaaccttcctttgatagttcaggtttgaaacactctttctgtaggatctgcaagtggctatttggaccactctgtggccttcgttcgaaacgggtatatcttcgcataaaatctagacagaagcattctcagaaaatactttgtgatgattgagttaaaatcacagagctgaacattcctttggatggagcaggtttgagacacactttttgtagaatctacaagtggatatttggacctctctgaggatttcgttggaaacgggataactgcacctaactaaacggaagcattctcagaaactgctttgtgatgattgcattcacctcacagagttgaacattcctattgatagagcagtttggaaacactcttgttgtggaatgtgcaagtggagatttggagcgctttgaggcctatggtagtaaagggaatagcttcatagaaaaactagacagatgcattctcaggaactttttggtgatgtttgtattcaacccccagagttgaactttcctttggaaagagcagctatgaaacactctttttctagaatctgcaagtggacgtttggagggctttgtggtttgtggtggaaaaggaaatatcttcacctaaatactagatagaagcattctcagaagcttctctgtgatgactgcattcaactcacggagttgaacactccttttgagagcgcagttttgaaactctctttctgtggcatctgcaaggggacatgtagacctctttgaagatttcgttggaaacggaatcatcttcacataaaaactatacagaagcagtctcagaatcttctttgtgatgtttgcattcaaatcccagagttgaactttcctttcaaagttcacgtttgaaacactctttttgcaggatctacaagtggatatttggaccactctgtgtccttcgttcgaaacgggtatatcttcacatgacatctagacagaagctttctcagaaaatcctttgggatgattgagtggaactcacagagctgaacattccttgcgatgtagcagtttagaaacacactttctgcagaatctgcaagtgcatatttggacctctctgaggaattcgttggaaacgggataatttcagctgactaaacagaagcattctcagaaccttcttcgtgatgtctgcattcaactcacagtgtggaacctttctttgatagttcaggtttgaaacactctttttgtagaaactgcaaggggatcattgcactctttgaggagtaccgtagtaaaggaaataacttcctataaaaagaagacagaagcattctcagaaccctcttcgtgatgtttgcattcaactcacagtgctgaacctttctttgatagttcagctttgaaacactcttcttgtagaaactgcaagtggatatttggtcctctctgaggatttcgttggaaacgggataaaccgcacagaactaaacagaagaattctcagagccctcttcgtgatgtttgcattcaactcacagtgctgaacctttctttgatagtgcagctttgaaacactctttttgtagaaactgcaagtggatgtttggtcctctctgaggatttcgttggaaacgggataaaccgcacagaactaaaacagaagcattgtcagaaacttctttgtgatgattgcattcaactcacagagttgaaggttccttttcaaacagcagtttccaatcactctttctgtggaatctgcaagtggatatttgggcctctctgaggatttcgttggaaacgggataaaacgcacagaactaaaacagaagcattctcagaaacttctctgtgatgtttgtgttcaactcccagagtttcacgttgcttttcatagagtagttctgaaacatgcttttcgtagtgtctgcaagtggacatttggagcgctttcaggcctgtggtggaaaacgaattatggtcacataaaaactggagagaagccttctcagaaacttctctgtgatgattgcattcaactcacagagttgaaccctcctatggatagagcagtgttgaaactctctttttgtggaacctgcaagtggatatgtggacctctccgaagatgtctttggaaacgggaatatcttcacataaaaactaaacagaagcattctcagaaacttcttggtgatgtttgcattcaaatcccagagttgaaccttcctttgatagttcaggtttgaaacactctttctgtaggatctgcaagtggctatttggaccactctgtggccttcgttcgaaacgggtatatcttcgcataaaatctagacagaagcattctcagaaaatactttgtgatgattgagtttaaatcacagagctgaccattcctttggatggagcaggtttgagacacactttttgtagaatctacaagtggatatttggacctctctgaggatttcgttggaaacgggataactgcacctaactaaacggaagcattctcagaaactgctttgtgatgattgcattcacctcacagagttgaacattcctattgatagagcagtttggaaacactcttgttgtggaatgtgcaagtggagatttggagcgctttgaggcctgtggtagtaaagggaatagcttcatagaaaaactagacagatgcattctcaggaactttttggtgatgtttgtattcaactcccagagttgaactttcctttggaaagagcagctatgaaacactctttttctagaatctgcaagtggacgtttggagggctttgtggtttgtggtggaaaaggaaatatcttcacctaaatactagatagaagcattctcagaagcttctctgtgatgactgcattcaactcacggagttgaacactccttttgagagcgcagttttgaaactctctttctgtggcatctgcaaggggacatgtagacctctttgaagatttcgttggaaacggaatcatcttcacataaaaactatacagaagcagtctcagaatcttctttgtgatgtttgcattcaaatcccagagttgaactttcctttcaaagttcacgtttgaaacactctttttgcaggatctacaagtggatatttggaccactctgtgtccttcgttcgaaacgggtatatcttcacaggacatctagacagaagctttctcagaaaattctttgggatgattgagtggaactcacagagctgaacattccttgcgatgtagcagtttagaaacacactttctgcagaatctgcaagtgcatatttggacctctctgaggaattcgttggaaacgggataatttcagctgactaaacagaagcattctcagaaccttcttcgtgatgtctgcattcaactcacagtgtggaacctttctttgatagttcaggtttgaaacactctttttgtagaaactgcaaggggataatggcacttctttgaggcctaccgtagtaaaggaaataacttcctatagaaagaagacagaagcattctcagaaccctcttcgtgatgtttgcattcaactcacagtgctgaacctttctttgatagttcagctttgaaacactcttcttgtagaaactgcaagtggatatttggtcctctctgaggatttcgttggaaacgggataaaccgcacagaactaaacagaagaattctcagagccctcttcgtgatgtttgcattcaactcacagtgctgaacctttctttgatagtgcagctttgaaacactctttttgtagaaactgcaagtggatgtttggtcctctctgaggatttcgttggaaacgggataaaccgcacagaactaaaacagaagcattgtcagaaacttctttgtgatgattgcattcaactcacagagttgaaggttccttttcaaacagcagtttccaatcactctttctgtggaatctgcaagtggatatttgggcctctctgaggatttcgttggaaacgggataaaacgcacagaactaaaacagaagcattctcagaaacttctctgtgatgtttgtgttcaactcccagagtttcacgttgcttttcatagagtagttctgaaacatgcttttcgtagtgtctgcaagtggacatttggagcgctttcaggcctgtggtggaaaacgaattatggtcacataaaaactggagagaagccttctcagaaacttctctgtgatgattgcattcaactcacagagttgaaccctcctatggatagagcagtgttgaaactctctttttgtggaatctgcaagtggatatgtggacctctccgaagatgtctttggaaacgggaatatcttcacataaaaactaaacagaagcattctcagaaatttcttggtgatgtttgcattcaaatcccagagttgaaccttcctttgatagttcaggtttgaaacactctttctgtaggatctgcaagtggctatttggaccactctgtggccttcgttcgaaacgggtatatcttcgcataaaatctagacagaagcattctcagaaaatactttgtgatgattgagtttaaatcacagagctgaccattcctttggatggagcaggtttgagacacactttttgtagaatctacaagtggatatttggacctctctgaggatttcgttggaaacgggataactgcacctaactaaacggaagcattctcagaaactgctttgtgatgattgcattcacctcacagagttgaacattcctattgatagagcagtttggaaacactcttgttgtggaatgtgcaagtggagatttggagcgctttgaggcctatgttagtaaagggaatagcttcatagaaaaactagacagatgcattctcaggaactttttggtgatgtttgtattcaactcccagagttgaactttcctttggaaagagcagctatgaaacactctttttctagaatctgcaagtggacgtttggagggctttgtggtttgtggtggaaaaggaaatatcttcacctaaatactagatagaagcattctcagaagcttctctgtgatgactgcattcaactcacggagttgaacactccttttgagagcgcagttttgaaactctctttctgtggcatctgcaaggggacatgtagacctctttgaagatttcgttggaaacggaatcatcttcacataaaaactatacagaagcagtctcagaatcttctttgtgatgtttgcattcaaatcccagagttgaactttcctttcaaagttcacgtttgaaacactctttttgcaggatctacaagtggatatttggaccactctgtgtccttcgttcgaaacgggtatatcttcacacgacatctagacagaagctttctcagaaaattctttgggatgattgagtggaactcacagagctgaacattccttgcgatgtagcagtttagaaacacactttctgcagaatctgcaagtgcatatttggacctctctgaggaattcgttggaaacgggataatttcagctgactaaacagaagcattctcagaaccttcttcgtgatgtctgcattcaactcacagtgtggaacctttctttgatagttcaggtttgaaacactctttttgtagaaactgcaaggggataattgcacttctttgaggcctaccgtagtaaaggaaataacttcctatagaaagaagacagaagcattctcagaaccctcttcgtgatgtttgcattcaactcacagtgctgaacctttctttgatagttcagctttgaaacactcttcttgtagaaactgcaagtggatatttggtcctctctgaggatttcgttgggaaacgggataaaccgcacagaactaaacagaagaattctcagagccctcttcgtgatgtttgcattcaactcacagtgctgaaactttctttgatagtgcagctttgaaacactctttttgtagaaactgcaagtggatatttggtcctctctgaggatttcgttggaaacgggataaaccgcacagaactaaaacagaagcattctcagaaccttcttcgtgatgtttgcattcaactcacagtgttgaacctttctttgatagttcaggtttgaaacggtctttctgtagaaactgcaagtagatatttggacctctctgaggatttcgttggaaacgggataacccgcacagaactaaaacagaagcattcacagaaaactcttggtgacgactgagtttaactcacagagctgaacattcctttggatggagcagtttcgaaacacactatttgtagaatgtgcaagtggatatttgggcctctctgaggatttcgttggaaatgggataaaccgcacagaactaaacagaagcattctcagaaactactttgtgatgattgcattcaagtcacagtagttgaacattccctttgacagagcagtttggaaactctctttgtgtagaatctgcaagtggagatatggaccgctttgaggcctatggtagtaaaggaaatagcttcatataaaagctagacagtagcattctcagaaacttctttgtgatgcttgcattcaactcacagagttgaactttcctttcgagagagaagctttgaaacactctttttccagaatctgcaagtggacatttggagggctttgaggcctgtggtggaaaaggaattatcttcccgtaaaagctagatagaagcattgtcagaaacttctttgtgatgattgcattcaactcacagagttgaaggttccttttcaaagagcagtttccaatcactctttctgtggaatctgcaagtggatatttggacctattttgaagatttcgttggaaacgggagaatcttcacaggaaagctaaacagaagcattctcagaaacttctctgtgatgtttgtgttcaactcccagagtttcacattgcttttcatagagtagttctgaaacatgcttttcgtagtgtctacaagtggacatttggagcgctttcaggcctgtggtggaaaacgaattatggtcacataaaaactggagagaagccttctcagaaacttctctgtgatgattgcattcaactcacagagttgaaccctcctatggatagagcagtgttgaaactctctttttgtggaatctgcaagtggatatgtggacctctccgaagatgtctttggaaacgggaatatcttcacataaaaactaaacagaagcattctcagaaacttcttggtgatgtttgcattcaaatcccagagttgaaccttcctttgatagttcaggtttgaaacactctttttgtaggatctgcaagtggatatttggaccactctgtggccttcgttcgaaacgggtatatcttcgcataaaatctagacagaagcattctcagaaaatactttgtgatgattgagtttaaatcacagagctgaacattcctttggatggagcaggtttgagacacactttttgtagaatctacaagtggatatttggacctctctgaggatttcgttggaaacgggataactgcacctaactaaacggaagcattctcagaaactgctttgtgatgattgcattcacctcacagagttgaacattcctattgatagagcagtttggaaacactcttgttgtggaatgtgcaagtggagatttggagcgctttgaggcctatggtagtaaagggaatagcttcatagaaaaactagacagatgcattctcaggaactttttggtgatgtttgtattcaactcccagagttgaactttcctttggaaagagcagctatgaaacactctttttctagaatctgcaagtggacgtttggagggctttgtggtttgtggtggaaaaggaaatatcttcacctaaatactagatagaagcattctcagaagcttctctgagatgactgcattcaactcacggagttgaacactccttttgagagcgcagttttgaaactctctttctgtggcatctgcaaggggacatgtagacctctttgaagatttcgttggaaacggaatcatcttcacataaaaactatacagaagcagtctcagaatcttctttgtgatgtttgcattcaaatccccgagttgaactttcctttcaaagttcacgtttgaaacactctttttgcaggatctacaagtggatatttggaccactctgtgtccttcgttcgaaacgggtatatcttcacatgacatctagacagaagctttctcagaaaattctttgggatgattgagttgaactcacagagctgagcattccttgcgatgtagcagtttagaaacacactttctgcagaatctgcaagtgcatatttggacctctgtgaggaattcgttggaaacgggataatttcagctgactaaacagaagcattctcagaaccttcttcttgatgtctgcattcaactcacagtgtggaacctttctttgatagttcaggtttgaaacactctttctgtagaaactgcaaggggataattgcactctttgaggagtaccgtagtaaaggaaataacttcctataaaaagaagacagaagaattctcagagccctcttcgtgatgtttgcattcaactcacagtgctgaacctttctttgatagtgcagctttgaaacactctttttgtagaaactgcaagtggatgtttggtcctctctgaggatttcgttggaaacgggataaaccgcacagaactaaaacagaagcattgtcagaaacttctttgtgatgattgcattcaactcacagagttgaaggttccttttcaaacagcagtttccaatcactctttctgtggaatctgcaagtggatatttgggcctctctgaggatttcgttggaaacgggataaaacgcacagaactaaaacagaagcattctcagaaacttctctgtgatgtttgtgttcaactcccagagtttcacgttgcttttcatagagtagttctgaaacatgcttttcgtagtgtctgcaagtggacatttggagcgctttcaggcctgtggtggaaaacgaattatggtcacataaaaactggagagaagccttctcagaaacttctctgtgatgattgcattcaactcacagagttgaaccctcctatggatagagcagtgttgaaactctctttttgtggaatctgcaagtggatatgtggacctctccgaagatgtctttggaaacgggaatatcttcacataaaaactaaacagaagcattctcagaaacttcttggtgatgtttgcattcaaatcccagagttgaaccttcctttgatagttcaggtttgaaacactctttctgtaggatctgcaagtggctatttggaccactctgtggccttcgttcgaaacgggtatatcttcgcataaaatctagacagaagcattctcagaaaatactttgtgatgattgagtttaaatcacagagctgaccattcctttggatggagcaggtttgagacacactttttgtagaatctacaagtggatatttggacctctctgaggatttcgttggaaacgggataactgcacctaactaaacggaagcattctcagaaactgctttgtgatgattgcattcacctcacagagttgaacattcctattgatagagcagtttggaaacactcttgttgtggaatgtgcaagtggagatttggagcgctttgaggcctgtggtagtaaagggaatagcttcatagaaaaactagacagatgcattctcaggaactttttggtgatgtttgtattcaactcccagagttgaactttcctttggaaagagcagctatgaaacactctttttctagaatctgcaagtggacgtttggagggctttgtggtttgtggtggaaaaggaaatatcttcacctaaatactagatagaagcattctcagaagcttctctgtgatgactgcattcaactcacggagttgaacactccttttgagagcgcagttttgaaactctctttctgtggcatctgcaaggggacatgtagacctctttgaagatttcgttggaaacggaatcatcttcacataaaaactatacagaagcagtctcagaatcttctttgtgatgtttgcattcaaatcccagagttgaactttcctttcaaagttcacgtttgaaacactctttttgcaggatctacaagtggatatttggaccactctgtgtccttcgttcgaaacgggtatatcttcacacgacatctagacagaagctttctcagaaaattctttgggatgattgagtaggaactcacagagctgaacattccttgcgatgtagcagtttagaaacacactttctgcagaatctgcaagtgcatatttggacctctctgaggaattcgttggaaacgggataatttcagctgactaaacagaagcattctcagaaccttcttcgtgatgtctgcattcaactcacagtgtggaacctttctttgatagttcaggtttgaaacactctttttgtagaaactgcaaggggatcattgcacttctttgaggcctaccgtagtaaaggaaataacttcctgtaaaaagaagacagaagcattcgcagaaccctcttcgtgatgtttgcattcaactcacggtgctgaacctttctttgatagttcagctttgaaacactctttttgtagaaactgcaagtggatatttggtcctctctgaggatttcgttggaaacgggataaaccgcacagaactaaacagaagcattctcagaaccttcttcgtgatgtttgcattcaactcacagtgttgaacctttctttcatagttcaggtttgaaacggtctttctgtagaaactgcaagtagatatttggacctctctgaggatttcgttggaaacgggataaacagcacagaactaaaacagaagcattcacagaaaactcttggtgacgactgagtttaactcacagagctgaagatccctttggatggagcagtttcgaaaaacactatttgtagaatgtgcaagtggatattggggcctctctgaggatttcgttggaaacggtataaaccgcacagaactaaacagaagcattctcagaaactactttgtgatgattgcattcaagtcacagagttgaacattccctttgacagagcagtttggaaactctctttgtgtagaatctgcaagtggagatatggaccgctttgaggcctatggtagtaaaggaaatagcttcatataaaagctagacagtagcattctcagaaacttctttgtgatgcttgcattcaactcacagagttgaactttcctttcgagagagaagctttgaaacactctttttccagaatgtgcaagtggacatttggagggctttgaggcctgtggtggaaaaggaattatcttcccgtgaaagctagatagaagcattgtcagaaacttctttgtgatgattgcattcaactcacagagttgaaggttccttttcaaacagcagtttccaatcactctttctgtggaatctgcaagtggatatttcgacctctttgaagatttcgttggaaacgggagaacattcacagaaaagctaaacagaagcattctcagaaacttctctgtgatgtttgtgttcaactcccagagtttcacgttgcttttcatagagtagttctgaaacatgcttttcgtagtgtctgcaagtggacatttggagcgctttcaggcctgtggtggaaaacgaattatggtcacataaaaactggagagaagccttctcagaaacttctctgtgatgattgcattcaactcacagagttgaaccctcctatggatagagcagtgttgaaactctctttttgtggaatctgcaagtggatatgtggacctctccgaagatgtctttggaaacgggaatatcttcacataaaaactaaacagaagcattctcagaaacttcttggtgatgtttgcattcaaatcccagagttgaaccttcctttgatagttcaggtttgaaacactctttctgtaggatctgcaagtggctatttggaccactctgtggccttcgttcgaaacgggtatatcttcgcataaaatctagacagaagcattctcagaaaatactttgtgatgattgagtttaaatcacagagctgaccattcctttggatggagcaggtttgagacacactttttgtagaatctacaagtggatatttggacctctctgaggatttcgttggaaacgggataactgcacctaactaaacggaagcattctcagaaactgctttgtgatgattgcattcacctcacagagttgaacattcctattgatagagcagtttggaaacactcttgttgtggaatgtgcaagtggagatttggagcgctttgaggcctgtggtagcaaagggaatagcttcatagaaaaactagacagatgcattctcaggaactttttggtgatgtttgtattcaactcccagagttgaactttcctttggaaagagcagctatgaaacactctttttctagaatctgcaagtggacgtttggagggctttgtggtttgtggtggaaaaggaaatatcttcacctaaatactagatagaagcatcctcagaagcttctctgtgatgactgcattcaactcacggagttgaacactccttttgagagcgcagttttgaaactctctttctgtggcatctgcaaggggacatgtagacctctttgaagatttcgttggaaacggaatcatcttcacataaaaactatacagaagcagtctcagaatcttctttgtgatgtttgcattcaaatccccgagttgaactttcctttcaaagttcacgtttgaaacactctttttgcaggatctacaagtggatatttggaccactctgtgtccttcgttcgaaacgggtatatcttcacatgacatctagacagaagctttctcagaaaattctttgggatgattgagttgaactcacagagctgagcattccttgcgatgtagcagtttagaaacacactttctgcagaatctgcaagtgcatatttggacctctgtgaggaattcgttggaaacgggataatttcagctgactaaacagaagcattctcagaaccttcttcgtgatgtctgcattcaactcacagtgtggaacctttctttgatagttcaggtttgaaacactctttttgtagaaactgcaaggggataattgcactctttgaggagtaccgtagtaaaggaaataacttcctataaaaagaagacagaagcattctcagaaccctcttcgtgatgtttgcattcaactcacagtgctgaacctttctttgatagttcagctttgaaacactctttttgtagaaactgcaagtggatatttggtcctctctgaggaattcgttggaaacgggataaactgcacagaactaaacagaagcattctcagaaccttcttcgtgatgtttgcattcaactcacagtgttgaacctttctttgatagttcaggtttgaaacggtctttctgtagaaactgcaagtagatatttggacctctctgaggatttcgttggaaacgggataacccgcacagaactaaaacagaagcattcacagaaaactcttggtgacgactgagtttaactcacagagctgaacattcctttggatggagcagtttcgaaacacactatttgtagaatgtgcaagtggatatttaggcctctctgaggatttcgttggaaacgggataaaccgcacagaactaaacagaagcattctcagaaactactttgtgatgattgcattcaagtcacagagttgaacattccctttgacagagcagtttggaaactctctttgtgtagaatctgcaagtggagatatggaccgctttgaggcctatggtagtaaaggaaatagcttcatataaaagctagacagtagcattctcagaaacttctttgtgatgcttgcattcaactcacagagttgaactttcctttcgagagagaagctttgaaacactctttttccagaatctgcaagtggacatttggagggctttgaggcctgtggtggaaaaggaattatcttcccgtaaaagctagatagaagcattgtcagaaacttctttgtgatgattgcattcaactcacagagttgaaggttccttttcaaagagcagtttccaatcactctttctgtggaatctgcaagtggatattcggacctattttgaagatttcgttggaaacgggagaatcttcacaggaaagctaaacagaagcattctcagaaacttctctgtgatgtttgtgttcaactcccagagtttcacgttgcttttcatagagtagttctgaaacatgcttttcgtagtgtctgcaagtggacatttggagcgctttcaggcctgtggtggaaaacgaattatggtcacataaaaactggagagaagccttctcagaaacttctctgtgatgattgcattcaactcacaggagttgaaccctcctatggatagagcagtgttgaaactctctttttgtggaatctgcaagtggatatgtggacctctccgaagatgtctttggaaacgggaatatcttcacataaaaactaaacagaagcattctcagaaacttcttggtgatgtttgcattcaaatcccagagttgaaccttcctttgatagttcaggtttgaaacactctttctgtaggatctgcaagtggctatttggaccactctgtggccttcgttcgaaacgggtatatcttcgcataaaatctagacagaagcattctcagaaaatactttgtgatgattgagtttaaatcacagagctgaccattcctttggatggagcaggtttgagacacactttttgtagaatctacaagtggatatttggacctctctgaggatttcgttggaaacgggataactgcacctaactaaacggaagcattctcagcaaactgctttgtgatgattgcattcacctcacagagttgaacattcctattgatagagcagtttggaaacactcttgttgtggaatgtgcaagtggagatttggagcgctttgaggcctatggtagtaaagggaatagcttcatagaaaaactagacagatgcattctcaggaactttttggtgatgtttgtattcaactcccagagttgaactttcctttggaaagagcagctatgaaacactgtttttctagaatctgcaagtggacgtttggagggctttgtggtttgtggtggaaaaggaaatatcttcacctaaatactagatagaagcattctcagaagcttctctgtgatgactgcattcaactcacggagttgaacactccttttgagagcgcagttttgaaactctctttctgtggcatctgcaaggggacatgtagacctctttgaagatttcgttggaaacggaatcatcttcacataaaaactatacagaagcagtctcagaatcttctttgtgatgtttgcattcaaatcccagagttgaactttcctttcaaagttcacgtttgaaacactctttttgcaggatctacaattttatatttggaccactctgtgtccttcgttcgaaacggctatatcttcacatgacatctagacagaagctttctcagaaaattctttgggatgattgagtggaactcacagagctgaacattccttgcgatgtagcagtttagaaacacactttctgcagaatctgcaagtgcatatttggacctctctgaggaattcgttggaaacgggataatttcagctgactaaacagaagcattctcagaaccttcttcgtgatgtctgcattcaactcacagtgtggaacctttctttgatagttcaggtttgaaacactctttttgtagaaactgcaaggggataattgcacttctttgaggcctaccgtagtaaaggaaataacttcctatagaaaaaagacagaagcattctcagaaccctcttcgtgatgtttgcattcaactcacagtgctgaacctttctttgatagttcagctttgaaacactcttcttgtagaaactgcaagtggatatttggacctctctgaggatttcgttggaaacgggataaaccgcacagaactaaacagaagcattctcagaaccttcttcgtgatgtttgcattcaactcacagtgttgaacctttctttgatagttcaggtttgaaacggtctttctgtagaaactgcaagtagatatttagacctctctgaggatttcgttggaaacgggataaacagcacagaactaaaacagaagcattcacagaaaactcttggtgacgactgagtttaactcacagagctgaacattcctttggatggagcagtttcgaaacacactatttgtagaatctgcaagtggatatttgggcctctctgaggatttcgttggaaacgggataaaacgcacagaactaaaacagaagcattctcagaaactactttgtgatgattgcattcaagtcacagagttgaacatttcctttgacagagcagtttggaaactctctttgtgtagaatctgcaagtggagatatggaccgctttgaggcctatggtagtaaaggaaataccttcatataaaagctagacagtagcattctcagaaacttctttgtgatgcttgcattcaactcatagagttgaactttcctttcgagagagaagctttgaaacactctttttccagaatgtgcaagtggacatttggggagctttgaggcctggggtggaaaaggaattatcttcccgtaaaaggtagatagaagcattgtcagaaacttctttgtgatgattgcattcaactcacagagttgaaggttccttttcaaacagcagtttccaatcactctttctgtggaatctgcaagtggatatttcgacctctttgaagatttcgttggaaacgggagaatcttcacagaaaagctaaacagaagcattctcagaaacttctctgtgatgtttgtgttcaactcccagagtttcacgttgcttttcatagagtagttctgaaacatgcttttcgtagtgtctgcaagtggacatttggagcgctttcaggcctgtggtggaaaacgaattatggtcacataaaaactggagagaagccttctcagaaacttttctgtgatgattgcattcaactcacagagttgaaccctcctatggacagagcagtgttgaaactctctttttgtggaatctgcaagtggatatgtggacctctccgaagatgtctttggaaacgggaatatcttcacataaaaactaaacagaagcattctcagaaacttcttggtgatgtttgcattcaaatcccagagttgaaccttcctttgatagttcaggtttgaaacactctttttgtaggatctgcaagtggctatttggaccactctgtggccttcgttcgaaacgggtatatcttcgcataaaatctagacagaagcattctcagaaaatactttgtgatgattgagtttaaatcacagagctgaacattcctttggatggagcaggtttgagacacactttttgtagaatctacaagtggatatttggacctctcggaggatttcgttggaaacgggataactgcacctaactaaacggaagcattctcagaaactgctttgtgatgattgcattcacctcacagagttgaacattcctattgatagagcagtttggaaacactcttgttgtggaatgtgcaagtggagatttggagcgctttgaggcctatggtagtaaagggaatagcttcatagaaaaactagacagatgcattctcaggaactttttggtgatgtttgtattcaactcccagagttgaactttcctttggaaagagcagctatgaaacactctttttctagaatctgcaagtggacgtttggagggctttgtggtttgtggtggaaaaggaaatatcttcacctaaatactagatagaagcattctcagaagcttctctgtgatgactgcattcaactcacggagttgaacactccttttgagagcgcagttttgaaactctctttctgtggcatctgcaaggggacatgtagacctctttgaagatttcgttggaaacggaatcatcttcacataaaaactatacagaagcagtctcagaatcttctttgtgatgtttgcattcaaatcccagagttgaactttcctttcaaagttcacgtttgaaacactctttttgcaggatctacaagtggatatttggaccactctgtgtccttcgttcgaaacgggtatatcttcacacgacatctagacagaagctttctcagaaaattctttgggatgattgagtggaactcacagagctgaacattccttgcaatgtagcagtttagaaacacactttctgcagaatctgcaagtgcatatttggacctctctgaggaattcgttggaaacgggataatttcagctgactaaacagaagcattctcagaaccttcttcgtgatgtctgcattcaactcacagtgtggaacctttctttgatagttcaggtttgaaacactctttttgtagaaattgcaagggtataattgcacttctttgaggcctaccgtagtaaaggaaataacttcctataaaaagaagacagaagaattctcagagccctcttcgtgatgtttgcattcaactcacagtgctgaacctttctttgatagtgcagctttgaaacactctttttgtagaaactgcaagtggatgtttggtcctctctgaggatttcgttggaaacgggataaaccgcacagaactaaaacagaagcattgtcagaaacttctttgtgatgattgcattcaactcacagagttgaaggttccttttcaaacagcagtttccaatcactctttctgtggaatctgcaagtggatatttgggcctctctgaggatttcgttggaaacgggataaaacgcacagaactaaaacagaagcattctcagaaacttctctgtgatgtttgtgttcaactcccagagtttcacgttgcttttcatagagtagttctgaaacatgcttttcgtagtgtctgcaagtggacatttggagcgctttcaggcctgtggtggaaaacgaattatggtcacataaaaactggagagaagccttctcagaaacttctctgtgatgattgcattcaactcacagagttgaaccctcctatggatagagcagtgttgaaactctctttttgtggaatctgcaagtggatatgtggacctctccgaagatgtctttggaaacgggaatatcttcacataaaaactaaacagaagcattctcagaaacttcttggtgatgtttgcattcaaatcccagagttgaaccttcctttgatagttcaggtttgaaacactctttctgtaggatctgcaagtggctatttggaccactctgtggccttcgttcgaaacgggtatatcttcgcataaaatctagacagaagcattctcagaaaatactttgtgatgattgagtttaactcacagagctgaacattcctttggatggagcaggcttgagacacactttttgtagaatccacaagtggatatttggacctctctgaggatttcgttggaaacgggataactgcaccgaactaaacggaagcattctcagaaactgctttgtgatgattgcattcacctcacagagttgaccattcctattgatagagcagtttggaaacactcttgttgtggaatgtgcaagtggagatttggagcgctttgaggcctatggtagtaaagggaatagcttcatagaaaaactagacagatgcattctcaggaactttttggtgatgtttgtattcaactcccagagttgaactttcctttggaaagagcagctatgaaacacgctttttctagaatctgcaagtggacgtttggagggctttgtggtttgtggtggaaaacgaaatatcttcacctaaatactagagagaagcattctcagaagcttctctgtgatgactgcattcaactcacggagttgaacactccttttgagagcgcagttttgaaactctgtttctgtggcatctgcaaggggacatgtagacctctttgaagatttcgttggaaacggaatcatcttcacataaaaactatacagaagcagtctcagaatcttccttgtgatgtttgcattcaaatcccagagttgaactttcctttcaaagttcacgtttgaaacactctttttgcaggatctacaagtggatatttggaccactctgtgtccttcgttcgaaacgggtatatcttcacatgacatctagacagaagcattgtcagaaacttctttgtgatgattgcattcaactcacagagttgaaggttccttttcaaacagcagtttccaaacaccctttctgtggaatctgcaagtgcatatttggacctctctgaggaattcgttggaaacgggataatttcagctgactaaacagaagcattctcagaaccttctctgtgatgtttgtgttcaactcccagagtttcacattgcttttcatagagtagttctgaaacatgcttttcgtagtgtctgcaagtggacatttggagcgctttcaggcctgtggtggaaaacgaattatggtcacataaaaactggagagaagccttctcagaaacttctctgtgatgattgcattcaactcacagatttgaaccctcctatggatagagcattgttgaaactctctttttgtggaatctgcaagtggatatgtggacctctccgaagatgtctttggaaacgggaatatcttcacataaaaactaaacagaagcattctcagaaacttcttggtgatgtttgcattcaaatcccagagttgaaccttcctgtgatagttcaggtttgaaacactctttttgtaggatctgcaagtggatatttggaccactctgtggccttcgttcgaaacgggtacatcttcacataaaatctagacagaagcattctcagaaaatactttgtgatgattgagtttaactcacagagctgaacattcctttggatggagcaggtttgagacacactttttgtagaatctacaagtggatatttggacctctctgaggatttcgttggaaacgcgataactgcacctaactaaacggaagcattctcagaaactgctttgtgatgattgcattcacctcacagagttgaacattcctattgatagagcagtttggaaacactcttgttgtggaatgtgcaagtggagatttggagcgctttgaggcctatggtagtaaagggaatagcttcatagaaaaactagacagatgcattctcaggaactttttggtgatgtttgtattcaactccgagagttgaactttcctttggaaagagcagctatgaaacactctttttctagaatctgcaagtggacgtttggagggctttgtggtttgtggtggaaaaggaaatatcttcacctaaatactagatacaagcattctcagaagcttctctgtgatgactgcattcaactcacggagttgaacactccttttgagagcgcagttttgaaactctctttctgtggcatctgcaaggggacatgtagacctctttgaagatttcgttggaaacggaatcatcttcacataaaaactatacagaagcagtctcagaatcttctttgtgatgtttgcattcaaatcccagagttgaactttcctttcaaagttcacgtttgaaacactctttttgcaggatctacaagtggatatttggaccactctgtgtccttcgttcgaaacgggtatattttcacacgacatctagacagaagctttctcagaaaattctttgggatgattgagtggaactcacagagctgaacattccttgcgatgtagcagtttagaaacacactttctgcagaatctgcaagtgcatatttggacctctctgaggaattcgttggaaacgggataatttcagctgactaaacagaagcattctcagaaccttcttcgtgatgtctgcattcaactcacagtgtggaacctttctttgatagttcaggtttgaaacactctttttgtagaaactgcaaggggataattgcacttctttgaggcctaccgtagtaaaggaaataacttcctataaaaagaagacagaagcattctcagaaccctcttcgtgatgtttgcattcaactcacagtgctgaacctttctttgatagttcagctttgaaacactcttcttgtagaaactgcaagtggatatttggtcctctctgaggatttcgttggaaacgggataaaccgcacagaactaaacagaagaattctcagagccctcttcgtgatgtttgcattcaactcacagtgctgaacctttctttgatagtgcagctttgaaacactctttttgtagaaactgcaagtggatgtttggtcctctctgaggatttcgttggaaacgggataaaccgcacagaactaaaacagaagcattgtcagaaacttctttgtgatgattgcattcaactcacagagttgaaggttccttttcaaacagcagtttccaatcactctttctgtggaatctgcaagtggatatttgggcctctctgaggatttcgttggaaacgggataaaacgcacagaactaaaacagaagcattctcagaaacttctctgtgatgtttgtgttcaactcccagagtttcacgttgcttttcatagagtagttctgaaacatgcttttcgtagtgtctgcaagtggacatttggagcgctttcaggcctgtggtggaaaacgaattatggtcacataaaaactggagagaagccttctcagaaacttctctgtgatgattgcattcaactcacagagttgaaccctcctatggatagagcagtgttgaaactctctttttgtggaatctgcaagtggatatgtggacctctccgaagatgtctttggaaacgggaatatcttcacataaaaactaaacagaagcattctcagaaacttcttggtgatgtttctattcaaatcccagagttgaaccttcctttgagagttcaggtttgaaacactctgtttgtaggatctgcaagtggatatttggaccactctgtggccttcgttcgaaacgggtacatcttcgcataaaatctagacagaagcattctcagaaaatactttgtgatgattgagttgaactcacagagctgaacattcctttggatggagcaggtttgagacacactttttgtagaatctacaagtggatatttggacctctctgaggatttcgttggaaacgggataactgcacctaactaaacggaagcattctcagaaactgctttgtgatgattgcattcacctcacagagttgaacattcctattgatagagcagtttggaaacactcttgttgtggaatgtgcaagtggagatttggagcgctttgaggcctatggtagtaaagggaatagcttcatagaaaaactagacagatgcattctcaggaactttttggtgatgtttgtattcaactcccagagttgaactttcctttggaaagagcagctatgaaacactctttttctagaatctgcaagtggacgtttggagggctttgtggtttgtggtggaaaaggaattatcttcacctaaatactagatagaagcattctcagaagcttctctgtgatgactgcattcaactcacggagttgaacactccttttgagagcgcagttttgaaactctctttctgtggcatctgcaaggggacatgtagacctctttgaagatttcgttggaaacggaatcatcttcacatcaaaactatacagaagcagtctcagaaacttctttgtgatgtttgcattcaaatcccagagttgaactttcctttcaaagttcacgtttgaaacactctttttgcaggatctacaagtggatatttggaccactctgtgtccttcgttcgaaaagggtatatcttcacatgacatctagacagaagctttctcagaaaattctttgggttgattgagttgaactcacagagctgaacattccttgtgatgtagcagtttagaaacacactttctgcagaatctgcaagtgcatatttggacctctctgaggaattcgttggaaacgggataatttcagctgactaaacagaagaattctcagaaccttcttcgtgatgtctgcattcaactcacagtgtggaacctttctttgatagttcaggtttgaaacactctttttgtagaaactgcaaggggataattgcacttctttgaggcctaccgtagtaaaggaaataacttcctatagaaagaagacagaagcattctcagaaccctcttcgtgatgtttgcattcaactcacagtgctgaacctttctttgatagttcagctttgaaacactcttcttgtagaaactgcaagtggatatttggtcctctctgaggatttcgttggaaacgggataaaccgcacagaactaaacagaagaattctcagagccctcttcgtgatgtttgcattcaactcacagtgctgaacctttctttgatagtgcagctttgaaacactctttttgtagaaactgcaagtggatgtttggtcctctctgaggatttcgttggaaacgggataaaccgcacagaactaaaacagaagcattgtcagaaacttctttgtgatgattgcattcaagtcacagagttgaaggttccttttcaaacagcagtttccaatcactctttctgtggaatctgcaagtggatatttggaactctttgaagatttcgttggaaacgggagaatcttcacagaaaagctaaacagaagcattctcagaaacttctctgtgatgtttgtgttcaactcccagagtttcacgttgcttttcatagagtagttctgaaacatgcttttcgtagtgtctgcaagtggacatttggagcgctttcaggcctgtggtggaaaacgaattatggtcacataaaaactggagagaagccttctcagaaacttctctgtgatgattgcattcaactcacagagttgaaccctcctatggatagagcagtgttgaaactctctttttgtggaatctgcaagtggatatgtggacctctccgaagatgtctttggaaacgggaatatcttcacataaaaactaaacagaagcattctcagaaacttcttggtgatgtttgcattcaaatcccagagttgaaccttcctttgatagttcaggtttgaaacactctttctgtaggatctgcaagtggctatttggaccactctgtggccttcgttcgaaacgggtatatcttcgcataaaatctagacagaagcattctcagaaaatactttgtgatgattgagtttaaatcacagagctgaccattcctttggatggagcaggtttgagacacactttttgtagaatctacaagtggatatttggacctctctgaggatttcgttggaaacgggataactgcacctaactaaacggaagcattctcagaaactgctttgtgatggttgcattcacctcacagagttgaacattcctattgatagagcagtttggaaacactcttgttgtggaatgtgcaagtggagatttggagcgctttgaggcctatggtagtaaagggaatagcttcatagaaaaactagacagatgcattctcaggaaccttttggtgatgtttgtattcaactcccagagttgaactttcctttggaaagagcagctatgaaacactctttttctagaatctgcaagtggacgtttggagggctttgtggtttgtggtggaaaaggaaatatcttcacctaaatactagatagaagcattctcagaagcttctctgtgatgactgcattcaactcacggagttgaacactccttttgagagcgcagttttgaaactctctttctgtggcatctgcaaggggacatgtagacctctttgaagatttcgttggaaacggaatcatcttcacataaaaactatacagaagcagtctcagaatcttctttgtgatgtttgcattcaaatcccagagttgaactttcctttcaaagttcacgtttgaaacactctttttgcaggatctacaagtggatatttggaccactctgtgtccttcgttcgaaacgggtatatcttcacacgacatctagacagaagctttctcagaaaattctttgggatgattgagtggaactcacagagctgaacattccttgcgatgtagcagtttagaaacacactttctgcagaatctgcaagtgcatatttggacctctctgaggaattcgttggaaacgggataatttcagctgactaaacagaagcattctcagaaccttcttcgtgatatctgcattcaactcacagtgtggaacctttctttgatagttcaggtttgaaacactctttttgtagaaactgcaaggggataattgcacttctttgaggcctaccgtagtaaaggaaataacttcctatagaaagaagacagaagcattctcagaaccctcttcgtgatgtttgcattcaactcacagtgctgaacctttctttgatagttcagctttgaaacactcttcttgtagaaactgcaagtggatatttggtcctctctgaggatttcgttggaaacgggataaaccgcacagaactaaacagaagaattctcagagccctcttcgtgatgtttgcattcaactcacagtgctgaacctttctttgatagtgcagctttgaaacactctttttgtagaaactgcaagtggatgtttggtcctctctgaggatttcgttggaaacgggataaaccgcacagaactaaaacagaagcattgtcagaaacttctttgtgatgattgcattcaactcacagagttgaaggttccttttcaaacagcagtttccaatcactctttctgtggaatctgcaagtggatatttgggcctctctgaggatttcgttggaaacgggataaaacgcacagaactaaaacagaagcattctcagaaacttctctgtgatgtttgtgttcaactcccagagtttcacgttgcttttcatagagtagttctgaaacatgcttttcgtagtgtctgcaagtggacatttggagcgctttcaggcctgtggtggaaaacgaattatggtcacataaaaactggagagaagccttctcagaaacttctctgtgatgattgcattcaactcacagagttgaaccctcctatggatagagcagtgttgaaactctctttttgtggaatctgcaagtggatatgtggacctctccgaagatgtctttggaaacgggaatatcttcacataaaaactaaacagaagcattctcagaaacttcttggtgatgtttgcattcaaatcccagagttgaaccttcctttgatagttcaggtttgaaacactctttctgtaggatctgcaagtggctatttggaccactctgtggccttcgttcgaaacgggtatatcttcgcataaaatctagacagaagcattctcagaaaatactttgtgatgattgagtttaaatcacagagctgaccattcctttggatggagcaggtttgagacacactttttgtagaatctacaagtggatatttggacctctctgaggatttcgttggaaacgggataactgcacctaactaaacggaagcattctcagaaactgctttgtgatgattgcattcacctcacagagttgaacattcctattgatagagcagtttggaaacactcttgttgtggaatgtgcaagtggagatttggagcgctttgaggcctgtggtagtaaagggaatagcttcatagaaaaactagacagatgcattctcaggaactttttggtgatgtttgtattcaactcccagagttgaactttcctttggaaagagcagctatgaaacactctttttctagaatctgcaagtggacgtttggagggctttgtggtttgtggtggaaaaggaaatatcttcacctaaatactagatagaagcattctcagaagcttctctgtgatgactgcattcaactcacggagttgaacactccttttgagagcgcagttttgaaactctctttctgtggcatccgcaaggggacatgtggacctctttgaagatttcgttggaaacggaatcatcttcacataaaaactatacagaagcagtctcagaatcttctttgtgatgtttgcattcaaatcccagagttgaactttcctttcaaacttcacgtttgaaacactctttttgcaggatctacaagtggatatttggaccactctgtgtccttcgttcgaaacgggtatatcttcacatgacatctagacagaagctttctcagaaaattctttgggatgattgagtggaactcacagagctgaacattccttgcgatgtagcagtttagaaacacactttctgcagaatctgcaagtgcatatttggacctctctgaggaattcgttggaaacgggataatttcagctgactaaacagaagcattctcagaaccttcttcgtgatgtctgcattcaactcacagtgtggaacctttctttgatagttcaggtttgaaacactctttttgtagaaactgcaaggggataattgcacttctttgaggcctaccgtagtaaaggaaataacttcctatagaaagaagacagaagcattctcagaaccctcttcgtgatgtttgcattcaactcacagtgctgaacctttctttgatagttcagctttgaaacactcttcttgtagaaactgcaagtggatatttggtcctctctgaggatttcgttggaaacgggataaaccgcacagaactaaacagaagcattctcagagccctcttcgtgatgtttgcattcaactcacagtgctgaaccttcctttgatagtgcagctttgaaacactctttttgtagaaactgcaactggatgtttggtcctctctgaggatttcgttggaaacgggataaaccgcacagaactaaaacagaagcattcacagaaaactcttggtgacgactgagtttaactcacagagctgaacattcctttggatggagcagtttcgaaacacactatttgtagaatctgcaagtggatattggggcctctctgaggatttcgttggaaacgggataaaacgcacagaactaaaacagaagcattctcagaaactactttgtgatgattgcattcaagtcacagagttgaacattccctttgacagagcagtttggaaactctctttgtgtagaatctgcaagtggagatatggaccgctttgaggcctatggtagtaaaggaaatagcttcatataaaagctagacagtagcattctcagaaacttctttgtgatgcttgcattcaactcacagagttgaactttcctttcgagagagaagctttggaacactccttttccagaatctgcaagtggacatttggagggctttgaggcctgtggtggaaaaggaattaccttcccgtaaaagctagatggaagcattgtcagaaacttctttgtgatgattgcattcaactcacagagttgaaggttccttttcaaacagcagtttccaatcactctttctgtggaatctgcaagtggatatttggacctagtttgaagatttcgttggaaacgggagaatcttcacagaaaagctaaacagaagcatactcagaaacttctctgtgatgtttgtgttcaactcccagagtttcacattgattttcatagagtagttctgaaacatgcttttcgtagtgtctgcaagtggacatttggagtgctttcaggcctgcggtggaaaacgaattatggtcacataaaaactggagagaagccttctcagaaacttctctgtgatgattgcattcaactcacagagttgaaccctcctatggatagagcagtgttgaaactctctttttgtggaatctgcaagtggatatgtggacctctccgaagatgtctttggaaacgggaatatcttcacataaaaactaaacagaagcattctcagaaacttcttggtgatgtttgcattcaaatcccagagttgaaccttcctttgatagttcaggtttgaaacactctttttgtaggatctgcaagtggctatttggaccactctgtggccttcgttcgaaacgggtatatcttcgcataaaatctagacagaagcattctcagaaaatactttgtgatgattgagtttaaatcacagagctgaacattcctttggatggagcaggtttgagacacactttttgtagaatctacaagtggatatttggacctctctgaggatttcgttggaaacggtataactgcacctaactaaacggaagcattctcagaaactgctttgtgatgattgcattcacctcacagagttgaacattcctattgatagagcagtttggaaacactcttgttgtggaatgtgcaagtggagatttggagcgctttgaggcctatggtagtaaagggaatagcttcatagaaaaactagaccgatgcattctcaggaactttttggtgatgtttgtattcaactcccagagttgaactttcctttggaaagagcagctatgaaacactctttttctagaatctgcaagtggacgtttggagggctttgtggtttgtggtggaaaaggaaatatcttcacctaaatactagagagaagcattctcagaagcttctctgtgatgactgcattcaactcacggagttgaacactccttttgagagcgcagttttgaaactctctttctgtggcatctgcaaggggacatgtagacctctttgaagatttcgttggaaacggaatcatcttcacataaaaactatacagaagcagtctcagaatcttctttgtgatgtttacattcaaatcccagagttgaactttcctttcaaagttcacgtttgaaacactctttttgcaggatctacaagtggatatttggaccactctgtgtccttcgttccaaacgggtatatcttcacatgacatctagacagaagctttctcagaaaattctttgggatgattgagttgaactcacagagctgaacattccttgcgatgtagcagtttagaaacagactttctgcagaatctgcaagtgcatatttggacctctctgaggaattcgttggaaacgggataatttcagctgactaaacagaagcattctcagaaccttcttcgtgatgtctgcattcaactcacagtgtggaaactttctttgatagttcaggtttgaaacactctttttgtagaaactgcaaggggataattgcacttctttgaggcctaccgtagtaaaggaaataacttcctataaaaagaagacagaagcattctcagaaccctcttcgtgatgtttacattgaactcacagtgctgaaactttctttgatagtacagctttgaaacactctttttgtagaaactgcaagtggatatttggtgctctctgaggatttcgttggaaacgggataaaccgcacagaactaaacagaagcattctcaaaaccttcttcgtgatgtttgcattcaactcacagtgttgaacctttctttgatagttcaggattgaaacggtctttctgtggaaactgcaagtagatattttgacctctctgaggatttcgttggaaacaggataaaccgcacagaactaaaacagaagcattcacagaaaactcttggtgacgactgagtttaactcacagagctgaacattcctttggatggagcagtttcgaaacacactatttgtagaatgtgcaagtggatatttgggcctctctgaggatttcgttggaaacgggataaaccgcacagaactaaacagaagcattctcagaaactactttgtgatgattgcattcaagtcacagagttgaacattccctttgacagagcagtttggaaactctttttgtgtagaatctgcaagtggagatatggaccgctttgaggcctatggtagtaaaggaaatagcttcatataaaagctagacggtagcattctcagaaacttctttgtgatgcttgcattcaactcacagagttgaactttcctttcgagagagaagctttgaaacactctttttccagaatctgcaagtggacatttggagggctttgaggcctgtggtggaaaaggaattaacttcccgtaaaagctagatagaagcattgtcagaaacttctttgtgatgattgcattcaactcacagagttgaaggttccttttcaaacagcagtttccaatcactctttctgtggaatctgcaagtggatatttgggcctctctgaggatttcgttggaaacgggataaaacgcacagaactaaaacagaagcattctcagaaacttctctgtgatgtttgtgttcaactcccagagtttcacgttgcttttcatagagtagttctgaaacatgcttttcgtagtgtctgcaagtggacatttggagcgctttcaggcctgtggtggaaaacgaattatggtcacataaaaactggagagaagccttctcagaaacttctctgtgatgattgcattcaactcacagagttgaaccctcctatggatagagcagtgttgaaactctctttttgtggaatctgcaattggatatgtggacctctccgaagatgtctttggaaacgggaatatcttcacataaaaactaaacagaagcattctcagaaacttcttggtgatgtttgcattcaaatcccagagttgaaccttcctttgatagttcaggtttgaaacactctttctgtaggatctgcaagtggctatttggaccactctgtggccttcgttcgaaacgggtatatcttcgcataaaatctagacagaagcattctcagaaaatactttgtgatgattgagtttaaatcacagagctgaccattcctttggatggagcaggtttgagacacactttttgtagaatctacaagtggatatttggacctctctgaggatttcgttggaaacgggataactgcacctaactaaacggaagcattctcagaaactgctttgtgatgattgcattcacctcacagagttgaacattcctattgatagagcagtttggaaacactcttgttgtggaatgtgcaagtggagatttggagcgctttgaggcctatgttagtaaagggaatagcttcatagaaaaactagacagatgcattctcaggaactttttggtgatgtttgtattcaactcccagagttgaactttcctttggaaagagcagctatgaaacactctttttctagaatctgcaagtggacgtttggagggctttgtggtttgtggtggaaaaggaaatatcttcacctaaatactagatagaagcattctcagaagcttctctgtgatgactgcattcaactcacggagttgaacactccttttgagagcgcagttttgaaactctccttctgtggcatccgcaaggggacatgtggacctctttgaagatttcgttggaaacggaatcatcttcacataaaaactatacagaagcagtctcagaatcttctttgtgatgtttgcattcaaatcccagagttgaactttcctttcaaagttcacgtttgaaacactctttttgcaggatctacaagtggatatttggaccactccgtgtcctccgttcgaaacgggtatatcttcacatgacatctagacagaagctttctcagaaaattctttgggatgattgagtggaactcacagagctgaacattccttgcgatgtagcagtttagaaacacactttctgcagaatctgcaagtgcatatttggacctctctgaggaattcgttggaaacgggataatttcagctgactaaacagaagcattctcagaaccttcttcgtgatgtctgcattcaactcacagtgtggaacctttctttgatagttcaggtttgaaacaatctttttgtagaaactgcaaggggataattgcacttctttgaggccaaccgtagtaaaggaaataacttcctatagaaagaagacagaagcattctcagagccctcttcgtgatgtttgcattcaactcacagtgctgaacctttctttgatagtgcagctttgaaacactcttcttgtagaaactgcaagtggatatttggtcctctctgaggatttcgttggaaacgggataaaccgcacagaactaaacagaagcattcacagaaaactcttggtgacgactgagtttaactcacagagctgaacattcctttggatggagcagtttcgaaacacactatttgtagaatctgcaagtggatatttgggcctctctgaggatttcgttggaaacgggataaaatgcacagaactaaaagagaagcattctcagaaactactttgtgatgattgcattcaagtcacagagttgaacattccctttgacagagcagtttggaaactctctttgtgtagaatctgcaagtggagatatggaccgctttgaggcctatggtagtaaaggaaatagcttcatataaaagctagacagtagcattctcagaaacttctttgtgatgcttgcattcaactcacagagttgaactttcctttggagagagaagctttgaaacactctttttccggaatctgcaagtggacatttggagggctttgaggcctgtggtggaaaaggaattatcttcccgtaaaagctagatagaagcattgtcagaaacttctttgtgatgattgcattcaactcacagagttgaaggttccttttcaaagagcagtttccaatcactctttctgtggaatctgcaagtggatatttggacctattttgaagatttcgttggaaacgggagaatcttcacaggaaagctaaacagaagcattctcagaaacttctctgtgatgtttgtgttcaactcccagagtttcacattgcttttcatagagtagttctgaaacatgcttttcgtagtgtctacaagtggacatttggagcgctttcaggcctgtggtggaaaacgaattatggtcacataaaaactggagagaagccttctcagaaacttctctgtgatgattgcattcaactcacagagttgaaccctcctatggatagagcagtgttgaaactctctttttgtggaatctgcaagtggatatgtggacctctccgaagatgtctttggaaacgggaatatcttcacataaaaactaaacagaagcattctcagaaacttcttggtgatgtttgcattcaaatcccagagttgaaccttcctttgatagttcaggtttgaaacactctttttgtaggatctgcaagtggatatttggaccactctgtggccttcgttcgaaacgggtatatcttcgcataaaatctagacagaagcattctcagaaaatactttgtgatgattgagtttaactcacagagctgaacattcctttggatggagcaggtttgagacacactttttgtagaatctacaagtggatatttggacctctctgaggatttcgttagaaacgggataactgcacctaactaaacggaagcattctcagaaactgctttgtgatgattgcattcacctcacagagttgaacattcctattgatagagcagtttggaaacactcttgttgtggaatgtgcaagtggagatttggagcgctttgaggtctatggtagtaaagggaatagcttcatagaaaaactagacagatgcattctcaggaactttttggtgatgtttgtattcaactcccagagttcaactttcctttggaaagagcagctatgaaacactctttttctagaatctgcaagtggacgtttggagggctttgcggtttgtggtggaaaaggaaatatcttcacctaaatactagatagaagcattctcagaagcttctctgtgatgactgcattcaactcacggagttgaacactccttttgagagcgcagttttgaaactctctttctgtggcatctacaaggggacatgtagacctctttgaagatttcgttggaaacggaatcatcttcacataaaaactatacagaagcagtctcagaatcttctttgtgatgtttgcattcaaatcccagagttgaactttcctttcaaagttcacgtttgaaacactctttttgcaggatctacaagtggatatttggaccactctgtgtccttcgttcgaaacgggtatatcttcacatgacatctagacagaagctttctcagaaaattctttgggatgattgagtggaactcacagagctgaacattccttgcgatgtagcagtttagaaacacactttctgcagaatctgcaagtgcatatttggacctctctgaggaattcgttggaaacgggataattacagctgactaaacagaagcattctcagaaccttcttcgtgatgtctgcattcaactcacagtgtggaacctttctttgatagttcaggtttgaaacactctttttgtagaaactgcaaggggataattgcacttctttgaggcctaccgtagtaaaggaaataacttcctatagaaagaagacagaagcattctcaggatcctcttcgtgatgtttgcattcaactcacagtgctgaacctttctttgatagttcagctttgaaacactcttcttgtagaaactgcaagtggatatttggtcctctctgaggatttcgttggaaacgggataaaccgcacagaactaaacagaagcattctcagaaccttcttcgtgatgtttgcattcaactcacagtgttgaacctttctttgatagttcaggtttgaaacggtctttctgtagaaactgcaagtagatatttggacctctctgaggatttcgttggaaacgggataaaccgcacagaactaaaacagaagcattcacagaaaactcttggtgacgactgagtttaactcacagagctgaacattcctttggatggagcagtttcgaaacacactatttgtagaatgtgcaagtggatatgtgggcctctctgaggatttcgttggaaacgggataaaccgcacagaactaaacagaagcattctcagaaactactttgtgatgattgcattcaagacacagagttgaacattccctttgacagagcagtttggaaactctctttgtgtagaatctgcaagtggagatatggaccgctttgaggcctatggtagtaaaggaaatagcttcatataaaagctagacagtagcattctcagaaacttctttgtgatgcttgcattcaactcacagagttgaactttcctttcgagagagaagctttgaaacactctttttccagaatctgcaagtggacatttggagggctttgaggcctgtggtggaaaaggaattatcttcccgtaaaagcctagatagaagcattgtcagaaacttctttgtgatgattgcattcaactcacagagttgaaggttccttttcaaacagcagtttccaatcactctttctgtggaatctgcaagtggatatttgggcctctctgaggatttcgttggaaacgggataaaacgcacagaactaaaacagaagcattctcagaaacttctctgtgatgtttgtgttcaactcccagagtttcacgttgcttttcatagagtagttctgaaacatgcttttcgtagtgtctgcaagtggacatttggagcgctttcaggcctgtggtggaaaacgaattatggtcacataaaaactggagagaagccttctcagaaacttctctgtgatgattgcattcaactcacagagttgaaccctcctatggatagagcagtgttgaaactctctttttgtggaatctgcaagtggatatgtggacctctccgaagatgtctttggaaacgggaatatcttcacataaaaactaaacagaagcattctcagaaacttcttggtgatgtttgcattcaaatcccagagttgaaccttcctttgatagttcaggtttgaaacactctttttgtaggatctgcaagtggctatttggaccactctgtggccttcgtttgaaacgggtatatcttcgcataaaatctagacagaagcattctcagaaaatactttgtgatgattgagtttaaatcacagagctgaacattcctttggatggagcaggtttgagacacactttttgtagaatctacaagtggatatttggacctctctgaggatttcgttggaaacgggataactgcacctaactaaacggaagcattctcagaaactgctttgtgatgattgcattcacctcacagagttgaacattcctattgatagagcagtttggaaacactcttgttgtggaatgtgcaagtggagatttggagcgctttgaggcctatggtagtaaagggaatagcttcatagaaaaactagacagaatgcattctcaggaactttttggtgatgtttgtattcaactcccagagttgaactttcctttggaaagagcagctatgaaacactctttttctagaatctgcaagtggacgtttggagggctttgtggtttgtggtggaaaaggaaatatcttcacctaaatactagatagaagcattctcagaagcttctctgtgatgactgcattcaactcacggagttgaacactccttttgagagcgcagttttgaaactctctttctgtggcatctgcaaggggacatgtagacctactttgaagatttcgttggaaacggaatcatcttcacataaaaactatacagaagcagtctcagaatcttctttgtgatgtttgcattcaaatcccagagttgaactttcctttcaaagttcacgtttgaaacactctttttgcaggatctacaagtggatatttggaccactctgtgtccttcgttcgaaacgggtatatcttcacacgacatctagacagaagctttctcagaaaattctttgggatgattgagtggaactcacagagctgaacattccttgcgatgtagcagtttagaaacacactttctgcagaatctgcaagtgcatatttggacctctctgaggaattcgttggaaacgggataatttcagctgactaaacagaagcattctcagaaccttcttcgtgatgtctgcattcaactcacagtgtggaacctttctttgatagttcaggtttgaaacactctttttgtagaaactgcaaggggataattgcacttctttgaggcctaccgtagtaaaggaaataacttcctatagaaagaagacagaagcattctcagaaccctcttcgtgatgtttgcattcaactcacagtgctgaacctttctttgatagttcagctttgaaacactcttcttgtagaaactgcaagtggatatttggtcctctctgaggatttcgttggaaacgggataaaccgcacagaactaaacagaagaattctcagagccctcttcgtgatgtttgcattcaactcacagtgctgaacctttctttgatagtgcagctttgaaacactctttttgtagaaactgcaagtggatgtttggtcctctctgaggatttcgttggaaacgggataaaccgcacagaactaaaacagaagcattgtcagaaacttctttgtgatgattgcattcaactcacagagttgaaggttccttttcaaacagcagtttccaatcactctttctgtggaatctgcaagtggatatttgggcctctctgaggatttcgttggaaacgggataaaacgcacagaactaaaacagaagcattctcagaaacttctctgtgatgtttgtgttcaactcccagagtttcacgttgcttttcatagagtagttctgaaacatgcttttcgtagtgtctgcaagtggacatttggagcgctttcaggcctgtggtggaaaacgaattatggtcacataaaaactggagagaagccttctcagaaacttctctgtgatgattgcattcaactcacagagttgaaccctcctatggatagagcagtgttgaaactctctttttgtggaatctgcaagtggatatgtggacctctccgaagatgtctttggaaacgggaatatcttcacataaaaactaaacagaagcattctcagaaacttcttggtgatgtttgcattcaaatcccagagttgaaccttcctttgatagttcaggtttgaaacactctttctgtaggatctgcaagtggctatttggaccactctgtggccttcgttcgaaacgggtatatcttcgcataaaatctagacagaagcattctcagaaaatactttgtgatgattgagtttaaatcacagagctgaccattcctttggatggagcaggtttgagacacactttttgtagaatctacaagtggatatttggacctctctgaggatttcgttggaaacgggataactgcacctaactaaacggaagcattctcagaaactgctttgtgatgattgcattcacctcacagagttgaacattcctattgatagagcagtttggaaacactcttgttgtggaatgtgcaagtggagatttggagcgctttgaggcctatggtagtaaagggaatagcttcatagaaaaactagacagatgcattctcaggaactttttggtgatgtttgtattcaactcccagagttgaactttcctttggaaagagcagctatgaaacactctttttctagaatctgcaagtggacgtttggagggctttgtggtttgtggtggaaaaggaaatatcttcacctaaatactagatagaagcattctcagaagcttctctgtgatgactgcattcaactcacggagttgaacactccttttgagagcgcagttatgaaactccctttctgtggcatctgcaaggggacatgtagacctctttgaagatttcgttggaaacggaatcatcttcacataaaaactatacagaagcagtctcagaatcttctttgtgatgtttgcattcaaatcccagagttgaactttcctttcaaagttcacgtttgaaacactctttttgcaggatctacaagtggatatttggaccactctgtgtccttcgttcgaaacgggtatatcttcacacgacatctagacagaagctttctcagaaaattctttgggatgattgagtggaactcacagagctgaacattccttgcgatgtagcagtttagaaacacactttctgcagaatctgcaagtgcatatttggacctctctgaggaattcgttggaaacgggataatttcagctgactaaacagaagcattctcagaaccttcttcgtgatgtctgcattcaactcacagtgtggaacctttctttgatagttcaggtttgaaacactctttttgtagaaactgcaaggggataattgcacttctttgaggcctaccgtagtaaaggaaataacttcctatagaaagaagacagaagcattctcagaaccctcttcgtgatgtttgcattcaactcacagtgctgaacctttctttgatagttcagctttgaaacactcttcttgtagaaactgcaagtggatatttggtcctctctgaggatttcgttggaaacgggataaaccgcacagaactaaacagaagaattctcagagccctcttcgtgatgtttgcattcaactcacagtgctgaacctttctttgatagtgcagctttgaaacactctttttgtagaaactgcaagtggatgtttggtcctctctgaggatttcgttggaaacgggataaaccgcacagaactaaaacagaagcattgtcagaaacttctttgtgatgattgcattcaactcacagagttgaaggttccttttcaaacagcagtttccaatcactctttctgtggaatctgcaagtggatatttgggcctctctgaggatttcgttggaaacgggataaaacgcacagaactaaaacagaagcattctcagaaacttctctgtgatgtttgtgttcaactcccagagtttcacgttgcttttcatagagtagttctgaaacatgcttttcgtagtgtctgcaagtggacatttggagcgctttcaggcctgtggtggaaaacgaattatggtcacataaaaactggagagaagccttctcagaaacttctctgtgatgattgcattcaactcacagagttgaaccctcctatggatagagcagtgttgaaactctctttttgtggaatctgcaagtggatatgtggacctctccgaagatgtctttggaaacgggaatatcttcacataaaaactaaacagaagcattctcagaaacttcttggtgatgtttgcattcaaatcccagagttgaaccttcctttgatagttcaggtttgaaacactctttctgtaggatctgcaagtggctatttggaccactctgtggccttcgttcgaaacgggtatatcttcgcataaaatctagacagaagcattctcagaaaatactttgtgatgattgagtttaaatcacagagctgaccattcctttggatggagcaggtttgagacacactttttgtagaatctacaagtggatatttggacctctctgaggatttcgttggaaacgggataactgcacctaactaaacggaagcattctcagaaactgctttgtgatgattgcattcacctcacagagttgaacattcctattgatagagcagtttggaaacactcttgttgtggaatgtgcaagtggagatttggagcgctttgaggcctatggtagtaaagggaatagcttcatagaaaaactagacagatgcattctcaggaactttttggtgatgtttgtattcaactcccagagttgaactttcctttggaaagagcagctatgaaacactctttttctagaatctgcaagtggacgtttggagggctttgtggtttgtggtggaaaaggaaatatcttcacctaaatactagatagaagcattctcagaagcttctctgtgatgactgcattcaactcacggagttgaacactccttttgagagcgcagttttgaaactctctttctgtggcatctgcaaggggacatgtagacctctttgaagatttcgttggaaacggaatcatcttcacataaaaactatacagaagcagtctcagaatcttctttgtgatgtttgcattcaaatcccagagttgaactttcctttcaaagttcacgtttgaaacactctttttgcaggatctacaagtggatatttggaccactctgtgtccttcgttcgaaacgggtatatcttcacacgacatctagacagaagctttctcagaaaattctttgggatgattgagtggaactcacagagctgaacattccttgcgatgtagcagtttagaaacacactttctgcagaatctgcaagtgcatatttggacctctctgaggaattcgttggaaacgggataatttcagctgactaaacagaagcattctcagaaccttcttcgtgatgtctgcattcaactcacagtgtggaacctttctttgatagttcaggtttgaaacactctttttgtagaaactgcaaggggataattgcacttctttgaggcctaccgtagtaaaggaaataacttcctatagaaagaagacagaagcattctcagaaccctcttcgtgatgtttgcattcaactcacagtgctgaacctttctttgatagttcagctttgaaacactcttcttgtagaaactgcaagtggatatttggtcctctctgaggatttcgttggaaacgggataaaccgcacagaactaaacagaagaattctcagagccctcttcgtgatgtttgcattcaactcacagtgctgaacctttctttgatagtgcagctttgaaacactctttttgtagaaactgcaagtggatgtttggtcctctctgaggatttcgttggaaacgggataaaccgcacagaactaaaacagaagcattgtcagaaacttctttgtgatgattgcattcaactcacagagttgaaggttccttttcaaacagcagtttccaatcactctttctgtggaatctgcaagtggatatttgggcctctctgaggatttcgttggaaacgggataaaacgcacagaactaaaacagaagcattctcagaaacttctctgtgatgtttgtgttcaactcccagagtttcacgttgcttttcatagagtagttctgaaacatgcttttcgtagtgtctgcaagtggacatttggagcgctttcaggcctgtggtggaaaacgaattatggtcacataaaaactggagagaagccttctcagaaacttctctgtgatgattgcattcaactcacagagttgaaccctcctatggatagagcagtgttgaaactctctttttgtggaatctgcaagtggatatgtggacctctccgaagatgtctttggaaacgggaatatcttcacataaaaactaaacagaagcattctcagaaacttcttggtgatgtttgcattcaaatcccagagttgaaccttcctttgatagttcaggtttgaaacactctttttgtaggatctgcaagtggctatttggaccactctgtggccttcgttcgaaacgggtatatcttcgcataaaatctagacagaagcattctcagaaaatactttgtgatgattgagtttaaatcacagagctgaacattcctttggatggagcaggtttgagacacactttttatagaatctacaagtggatatttggacctctctgaggatttcgttggaaacgggataactgcacctaactaaacggaagcattctcagaaactgcttagtgatgattgcattcacctcacagagttgaacattcctattgatagagcagtttggaaacactcttgttgtggaatgtgcaagtggagatttggagcgctttgaggcctatggtagtaaagggaatagcttcatagaaaaactagacagatgcattctcaggaactttttgatgatgtttgtattcaactcccagagttgaactttcctttggaaagagcagctatgaaacactctttttctagaatctgcaagtggacgtttggagggctttgtggtttgtggtggaaaaggaaatatcttcacctaaatactagatagaagcattctcagaagcttctctgtgatgactgcattcaactcacggagttgaacactccttttgagagcgcagttttgaaactctctttctgtggcatctgcaaggggacatgtagacctctttgaagatttcgttggaaacggaatcatcttcacatcaaaactatacagaagcagtctcagaatcttctttgtgatgtttgcattcaaatcccagagttgaactttcctttcaaagttcacgtttgaaacactctttttgcaggatctacaagtggatatttggaccactctgtgtccttcgttcgaaacgggtatatcttcacatgacatctagacagaagctttctcagaaaattctttgggatgattgagttgaactcacagagctgaacattccttgcgatggagcagtttagaaacacactttctgcagaatctgcaagtgcatatgtggacctctctgaggaattcgttggaaacgggataatttcagctgactaaacagaagcattctcagaaccttcttcgtgatgtctgcattcaactcacagtgtggaacctttctttgatagttcaggtttgaaacactctttttgtagagactgcaaggggataattgcacttctttgaggcctaccgtagtaaaggaaataacttcctataaaaagaagacagaagaattctcagagccctcttcgtgatgtttgcattcaactcacagtgctgaacctttctttgatagtgcagctttgaaacactctttttgtagaaactgcaagtggatgtttggtcctctctgaggatttcgttggaaacgggataaaccgcacagaactaaaacagaagcattgtcagaaacttctttgtgatgattgcattcaactcacagagttgaaggttccttttcaaacagcagtttccaatcactctttctgtggaatctgcaagtggatatttgggcctctctgaggatttcgttggaaacgggataaaacgcacagaactaaaacagaagcattctcagaaacttctctgtgatgtttgtgttcaactcccagagtttcacgttgcttttcatagagtagttctgaaacatgcttttcgtagtgtctgcaagtggacatttggagcgctttcaggcctgtggtggaaaacgaattatggtcacataaaaactggagagaagccttctcagaaacttctctgtgatgattgcattcaactcacagagttgaaccctcctatggatagagcagtgttgaaactctctttttgtggaatctgcaagtggatatgtggacctctccgaagatgtctttggaaacgggaatatcttcacataaaaactaaacagaagcattctcagaaacttcttggtgatgtttgcattcaaatcccagagttgaaccttcctttgatagttcaggtttgaaacactctttctgtaggatctgcaagtggctatttggaccactctgtggccttcgttcgaaacgggtatatcttcgcataaaatctagacagaagcattctcagaaaatactttgtgatgattgagtttaaatcacagagctgaccattcctttggatggagcaggtttgagacacactttttgtagaatctacaagtggatatttggacctctctgaggatttcgttggaaacgggataactgcacctaactaaacggaagcattctcagaaactgctttgtgatgattgcattcacctcacagagttgaacattcctattgatagagcagtttggaaacactcttgttgtggaatgtgcaagtggagatttggagcgctttgaggcctgtggtagtaaagggaatagcttcatagaaaaactagacagatgcattctcaggaactttttggtgatgtttgtattcaactcccagagttgaactttcctttggaaagagcagctatgaaacactctttttctagaatctgcaagtggacgtttggagggctttgtggtttgtggtggaaaaggaaatatcttcacctaaatactagatagaagcattctcagaagcttctctgtgatgactgcattcaactcacggagttgaacactccttttgagagcgcagttttgaaactctctttctgtggcatctgcaaggggacatgtagacctctttgaagatttcgttggaaacggaatcatcttcacataaaaactatacagaagcagtctcagaatcttctttgtgatgtttgcattcaaatcccagagttgaacttccctttcaaagttcacgtttgaaacactctttttgcaggatctacaagtggatatttggaccactctgtgtccttcgttcgaaacgggtatatcttcacatgacatctagacagaagctttctcagaaaattctttggaatgattgagtggaactcacagagctgaacattccttgcgatgtagcagtttagaaacacactttctgcagaatctgcaagtgcatatttggacctctctgaggaattcgttggaaacgggataatttcagctgactaaacagaagcattctcagaaccttcttcgtgatgtctgcattcaactcacagtgtggaacctttctttgatagttcaggtttgaaacactctttttgtagaaactgcaaggggataattgcacttctttgaggcctaccgtagtaaaggaaataacttcctatagaaagaagacagaagcattctcagaaccctcttcgtgatgtttgcattcaactcacagtgctgaacctttctttgatagttcagctttgaaacactcttcttgtagaaactgcaagtggatatttggtcctctctgaggatttcgttggaaacgggataaaccgcacagaactaaacagaagcattctctgaaccttcttcgtgatgtttgcattcaactcacagtgttgaacctttctttgatagttcaggttggaaacggtctttctgtagaaactgcaagtagatatttggacctctctgaggatttcgttggaaacgggataaaccgcacagaactaaaacagaagcattcacagaaaactcttggtgacgactgagtttaactcacagagctgaacattcctttggatggagcagtttcgaaacacactatttgtagaatgtgcaagtggatatttgggcctctctgaggatttcgctggaaacgggataaaccgcacagaactaaacagaagcattctcagaaactactttgtgatgattgcattcaagtcacagagttgaacattccctttgacagagcagtttggaaactctctttgtgtagaatctgcaagtggagatatggaccgctttgaggcctatggtagtaaaggaaatagcttcatataaaagctagacagtagcattctcagaaacttctttgtgatgcttgcattcaactcacagagttgaactttcctttcgagagagaagctttgaaacactctttttccagaatgtgcaagtggacatttggagggctttgaggcctgtggtggaaaaggaattatcttcccgtaaaagctagatagaagcattgtcagaaacttctttgtgatgattgcattcaactcacagagttgaaggttccttttcaaagagcagtttccaatcactctttctgtggaatctgcaagtggatatttcgacctattttgaagatttcgttggaaacgggagaatcttcacagaaaagctaaacagaagcattctcagaaacttctctgtgatgtttgtgttcaactcccagagtttcacattgcttttcatagagtagttctgaaacatgcttttcgtagtgtctacaagtggacatttggagcgcttccaggcctgtggtggaaaacgaattatggtcacataaaaactggagagaagccttctcagaaacttctctgtgatgattgcattcaactcacagagttgaaccctcctatggatagagcattgttgaaactctctttttgtggaatctgcaagtggatatgtggacctctccgaagatgtctttggaaacgggaatatcttcacataaaaactaaacagaagcattctcagaaacttcttggtgatgtttgcattcaaatcccagagttgaaccttcctttgatagttcaggtttgaaacactctttttgtaggatctgcaagtggatatttggaccactctgtggccttcgttcgaaacgggtacatcttcacataaaatctagacagaagcattctcagaaaatactttgtgatgattgagtttaaatcacagagctgaccattcctttggatggagcaggtttgagacacactttttgtagaatctacaagtggatatttggacctctctgaggatttcgttggaaacgggataactgcacctaactaaacggaagcattctcagaaactgctttgtgatgattgcattcacctcacagagttgaacattcctattgatagagcagtttggaaacactcttgttgtggaatgtgcaagtggagatttggagcgctttgaggcctatggtagtaaagggaatagcttcatagaaaaactagacagatgcattctcaggaactttttggtgatgtttgtattcaactcccagagttgaactttcctttggaaagagcagctatgaaacactctttttctagaatctgcaagtggacgtttggagggctttgtggtttgtggtggaaaaggaaatatcttcacctaaatactagatagaagcatcctcagaagcttctctgtgatgactgcattcaactcacggagttgaacactccttttgagagcgcagttttgaaactctctttctgtggcatctgcaaggggacatgtagacctctttgaagatttcgttggaaacggaatcatcttcacataaaaactacacagaagcagtctcagaatcttctttgtgatgtttgcattcaaatcccagagttgaactttcctttcaaagttcacgtttgaaacactctttttgcaggatctacaagtggatatttggaccactctgtgtccttcgttcgaaacgggtatatcttcacaggacatctagacagaagctttctcagaaaattctttgggatgactgagttgaactcacagagctgaacattccttgcgatgtagcagtttagaaacagactttctgcagaatctgcaagtgcatatttggacctctctgaggaattcgttggaaacgggataatttcagctgactaaacagaagcattctcagaaccttcttcgtgatgtctgcattcaactcacagtgtggaaactttctttgatagttcagctttgaaacactctttttgtagaaactgtaaggggattattgcacttctttgaggcctaccgtagtaaaggaaattacttcctataaaaagaagacagaagcattctcagaaccttcttcgtgatgtttgcattcaactcacaatgctgaacctttctttgatagttcagctttgaaacactctttttgtagaaactgcaagtggatatttggtgctctctgaggatttcgttggaaacgggataaaccgcacagaactaaacagaagcattcacagaaaactcttggtgacgactgagtttaactcacagagctgaacattcctttggatggagcagtttcgaaacacactctttgtagaatctgcaagtggatatttgggcctctctgaggatttcgttggaaacgggataaaccgcacagaactaaaacagaagcattctgagaaactactttgtgatgattgcattcaagtcacagagctgaacattccctttgacagagcagtttggaaactctctttgtgtagaatctgcaagtggagatatggaatgctttgaggactatggtagtaaaggaaatagcttcatataaaagctagacagtagcattctcagaaacttctttgtgatgcttgcattcaactcacagagttgaactttcctttcgagagagaagctttgaaacactctttttccagaatctgcaagtggacatttggagggctttgaggcctgcggtggaaaaggaattatcttcctgtaaaagctggatagaagcattgtcagaaacttctttgtgatgattgcattcaactcacagagttgaaggttccttttcaaacagcagtttccaatcactctttctgtggaatctgcaagtggatatttggacctagtttgaagatttcgttggaaacgggagaatcttcacagaaaagctaaacagaagcattctcagaaacttctctgtgatgtttgtgttcaactcccagagtttcacattgcttttcatagagtagttctgaaacatgcttttcgtagtgtctacaagtggacatttggagcgctttcaggcctgtggtggaaaacgaattatggtcacataaaaactggagagaagccttctcagaaacttctctgtgatgattgcattcaactcacagagttgaaccctcctatggatagagcagtgttgaaactctctttttgtggaatctgcaagtggatatgtggacctctccgaagatgtctttggaaacgggaatatcttcacataaaaactaaacagaagcattctcagaaacttcttggtgatgtttgcattcaaatcccagagttgaaccttcctttgatagttcaggtttgaaacactctttttgtaggatctgcaagtggatatttggaccactctgtggccttcgttcgaaacgggtatatcttcgcataaaatctagacagaagcattctcagaaaatactttgtgatgattgagttgaactcacagagctgaacattcctttggatggagcaggtttgagacacactttttgtagaatctacaagtggatatttggacctctctgaggatttcgttggaaacgggataactgcacctaactgaacggaagcattctcagaaactgctttgtgatgattgcattcacctcacagagttgaacattcctattgatagagcagtttggaaacactcttgttgtggaatgtgcaagtggagatttggagcgctttgaggcctatggtagtaaagggaatagcttcatagaaaaactagacagatgcattctcaggaactttttggtgatgtttgtattcaactcccagagttgaactttcctttggaaagagcagctatgaaacactctttttctagaatctgcaagtggacgtttggagggctttgtggtttgtggtggaaaaggaaatatcttcacctaaatactagatagaaagcattctcagtaagcttctctgtgatgactgcattcaactcacggagttgaacactccttttgagagcgcagttttgaaactctctttctgtggcatctgcaaggggacatgtagacctctttgaagatttcgttggaaacggaatcatcttcacataaaaactatacagaagcagtctcagaatcttctttgtgatgtttgcattcaaatcccagagttgaactttcctttcaaagttcacgtttgaaacactctttttgcaggatctacaagtggatatttggaccactctgtgtccttcgttcgaaacgggtatatcttcacatgacatctagacagaagctttctcagaaaattctttgggatgattgagtggaactcacagagctgaacattccttgcgatgtagcagtttagaaacacactttctgcagaatctgcaagtgcatatttggacctctctgaggaattcgttggaaacgggataatttcagctgactaaacagaagcattctcagacacccttcttcgtgatgtctgcattcaactcacagtgtggaacctttctttgatagttcaggtttgaaacactctttttgtagaaactgcaaggggataattgcacttctttgaggcctaccgtagtaaaggaaataacttcctatagaaagaagacagaagcattctcagaaccctcttcgtgatgtttgcattcaactcacagtgctgaacctttctttgatagttcagctttgaaacactcttcttgtagaaactgcaagtggatatttggtcctctctgaggatttcgttggaaacgggataaaccgcacagaactaaacagaagcattctcagaaccttcttcgtgatgtttgcattcaactcacagtgttgaacctttctttgatagttcaggtttgaaacggtctttctgtagaaactgcaagtagatatttggacctctctgaggatttcgttggaaacgggataaaccgcacagaactaaaacagaagcattcacagaaaactcttggtgacgactgagtttaactcacagagctgaacattccctttggatggagcagtttcgaaacacactatttgtagaatgtgcaagtggatatttaggcctctctgaggatttcgttggaaacgggataaaccgcacagaactaaacagaagcattctcagaaactactttgtgatgattgcattcaagtcacagagttgaacattccctttgacagagcagtttggaaactctctttgtgtagaatctgcaagtggagatatggaccgctttgaggcctatggtagtaaaggaaatagcttcatataaaagctagacagtagcattctcagaaacttctttgtgatgcttgcattcaactcacagagttgaactttcctttcgagagagaagctttgaaacactctttttccagaatctgcaagtggacatttggagggctttgaggcctgtggtggaaaaggaattatcttcccgtaaaagctagatagaagcattgtcagaaacttctttgggatgattgcattcaactcacagagttgaaggttccttttcaaagagcagtttccaatcactctttctgtggaatctgcaagtggatattcggacctattttgaagatttcgttggaaacgggagaatcttcacaggaaagctaaacagaagcattctcagaaacttctctgtgatgtttgtgttcaactcccagagtttcacattgcttttcatagagtagttctgaaacatgcttttcgtagtgtctacaagtggacatttggagcgctttcaggcctgtggtggaaaacgaattatggtcacataaaaactggagagaagccttctcagaaacttctctgtgatgattgcattcaactcacagagttgaaccctcctatggatagagcagtgttgaaactctctttttgtggaatctgcaagtggatatgtggacctctccgaagatgtctttggaaacgggaatatcttcacataaaaactaaacagaagcattctcagaaacttcttggtgatgtttgcattcaaatcccagagtcgaaccttcctttgatagttcaggtttgaaacactctttttgtaggatctgcaagtggatatttggaccactctgtggccttcgttcgaaacgggtgtatcttcgcataaaatctagacagaagcattctcagaaaatactttgtgatgattgagtttaactcacagagctgaacattcctttggatggagcaggtttgagacacaccttttgtagaatctacaagtggatatttggacctctctgaggatttcgttggaaacgggataactgcacctaactaaacggaagcattctcagaaactgctttgtgatgattgcattcacctcacagagttgaacattcctattgatagagcagtttggaaacactcttgttgtggaatgtgcaagtggagatttggagcgctttgaggcctatggtagtaaagggaatagcttcatagaaaaactagacagatgcattctcaggaactttttggtgatgtttgtattcaactcccagagttgaactttcctttggaaagagcagctatgaaacactctttttctagaatctgcaagtggacgtttggagggctttgtggtttgtggtggaaaaggaaatatcttcacctaaatactagatagaagcattctcagaagcttctctgtgatgactgcattcaactcacggagttgaacactccttttgagagcgcagttttgaaactctctttctgtggcatccgcaaggggacatgtggacctctttgaagatttcgttggaaacggaatcatcttcacataaaaactatacagaagcagtctcagaatcttctttgtgatgtttgcattcaaatcccagagttgaactttcctttcaaagttcacgtttgaaacactctttttgcaggatctacaagtggatatttggaccactctgtgtccttcgttcgaaacgggtatatcttcacaggacatctagacagaagctttctcagaaaattctttgggatgattgagtggaactcacagagctgaacattccttgcgatgtagcagtttagaaacacactttctgcagaatctgcaagtgcatatttggacctctctgaggaattcgttggaaacgggataatttcagctgactaaacagaagcattctcagaaccttcttcgtgatgtctgcattcaactcacagtgtggaacctttctttgatagttcaggtttgaaacactctttttgtagaaactgcaaggggataattgcacttctttgaggcctaccgtagtaaaggaaataacttcctatagaaagaagacagaagcattctcagaaccctcttcgtgatgtttgcattcaactcacagtgctgaacctttctttgatagttcagctttgaaacactcttcttgtagaaactgcaagtggatatttggtcctctctgaggatttcgttggaaacgggataaaccgcacagaactaaacagaagaattctcagagccctcttcgtgatgtttgcattcaactcacagtgctgaacctttctttgatagtgcagctttgaaacactctttttgtagaaactgcaagtggatgtttggtcctctctgaggatttcgttggaaacgggataaaccgcacagaactaaaacagaagcattgtcagaaacttctttgtgatgattgcattcaactcacagagttgaaggttccttttcaaacagcagtttccaatcactctttctgtggaatctgcaagtggatatttgggcctctctgaggatttcgttggaaacgggataaaacgcacagaactaaaacagaagcattctcagaaacttctctgtgatgtttgtgttcaactcccagagtttcacgttgcttttcatagagtagttctgaaacatgcttttcgtagtgtctgcaagtggacatttggagcgctttcaggcctgtggtggaaaacgaattatggtcacataaaaactggagagaagccttctcagaaacttctctgtgatgattgcattcaactcacagagttgaaccctcctatggatagagcagtgttgaaactctctttttgtggaatctgcaagtggatatgtggacctctccgaagatgtctttggaaacgggaatatcttcacataaaaactaaacagaagcattctcagaaacttcttggtgatgtttgcattgaaatcccagagttgaaccttcctttgatagttcaggtttgaaacactctttttgtaagatctgcaagtggctatttggaccactctgtggccttcgttcgaaacgggtatatcttcgcataaaatctagacagaagcattctcagaaaatactttgtgatgattgagttgaactcacagagctgaacattcctttggatggagcaggtttgagacacactttttgtagaatctacaagtggatatttggacctctctgaggatttcgttggaaacgggataactgcacctaactaaacggaagcattctcagaaactgctttttcatgattgcattcacctcacagagttgaacattcctattgatagagcagtttggaaacactcttgttgtggaatgtgcaagtggagatttggagcgctttgaggcctatggtagtaaagggaatagcttcatagaaaaagtagacagatgcattatcaggaactttttggtgatgtttgtattcaactcccagagttgaactttcctttggaaagagcagctatgaaacactctttttctagaatctgcaagtggacgtttggacggctttgtggtttgtggtggaaaaggaaatatcttcacctaaatactagatagaagcattctcagaagcttctctgtgatgactgcattcaactcacggagttgaacactccttttgagagcgcagttttgaaagtctctttctgtggcatccgcaaggggacatgtagacctctttgaagatttcgttggaaacggaatcatcttcacataaaaactatacagaagcagtctcagaatcttctttgtgatgtttgcattcaaatcccagagttgaactttcctttcaaagttcacgtttgaaacactctttttgcaggatctacaagtggatatttggaccactctgtgtccttcgttcgaaacgggtatatcttcacacgacatctagacagaagctttctcagaaaattctttgggatgattgagtggaactcacagagctgaacattccttgcgatgtagcagtttagaaacacactttctgcagaatctgcaagtgcatatttggacctctctgaggaattcgttggaaacgggataatttcagctgactaaacagaagcattctcagaaccttcttcgtgatgtctgcattcaactcacagtgtggaacctttctttgatagttcaggtttgaaacactctttttgtagaaactgcaaggggataattgcacttctttgaggcctaccgtagtaaaggaaataacttcctatagaaagaagacagaagcattctcagaaccctcttcgtgatgtttgcattcaactcacagtgctgaacctttctttgatagttcagctttgaaacactcttattgtagaaactgcaagtggatatttggtcctctctgaggatttcgttggaaacgggataaaccgcacagaactaaacagaagaactctcagagccctcttcgtgatgtttgcattcaactcacagtgctgaacctttctttgatagtgcagctttgaaacactctttttgtagaaactgcaagtggatatttggtcctctctgaggatttcgttggaaacgggataaaacgcacagaactaaacagaagcattcacagaaaactcttggtgacgactgagtttaactcacagagctgaacattcctttggatggagcagtttcgaaacacactatttgtagaatctgcaagtggatatttgggcctctctgaggatttcgttggaaacgggataaaacgcacagaactaaaacagaagcattctcagaaactactttgtgattattgcattcaagtcacagagttgaacattccctttgacagagcagtttggaaactctctttgtgtagaatctacaagtggagatatggaccgctttgaggcctatggtagtaaaggaaatagcttcatataaaagctagacagtagcattctcagaaacttctttgtgatgcttgcattcaactcacagagttgaactttcctttcgagagagaagctttgaaacactctttttccagaatgtgcaagtggacatttggggagctttgaggcctgtggtggaaaaggaattatcttcccgtaaaagctagatagaagcattgtcagaaacttctttctgatgattgcattcaactcacagagttgaaggttccttttcaaacagcagtttccaatcactctttctgtggaatctgcaagtggatatttcgacctctttgaagatttcgttggaaacgggagaatcttcacagaaaagctaaacagaagcattctcagaaacttctctgtgatgtttgtgttcaactcccagagtttcacattgcttttcatagagtagttctgaaacatgcttttcgtagtgtctacaagtggacatttggagcgctttcaggcctgtggtggaaaacgaattatggtcacataaaaactggagagaagccttctcagaaacttctctgtgatgattgcattcaactcacagagttgaaccctcctatggatagagcagtgttgaaactctctttttgtggaatctgcaagtggatatgtggacctctccgaagatgtctttggaaacgggaatatcttcacataaaaactaaacagaagcattctcagcaaacttcttggtgatgtttgcattcaaatcccagagtcgaaccttcctttgatagttcaggtttgaaacactctttttgtaggatctgcaagtggatatttggaccactctgtggccttcgttcgaaacgggtatatcttcgcataaaatctagacagaagcattctcagaaaatactttgtgatgattgagtttaaatcacagagctgaccattcctttggatggagcaggtttgagacacactttttgtagaatctacaagtggatatttggacctctctgaggatttcgttggaaacgggataactgcacctaactaaacggaagcattctcagaaactgctttgtgatgattgcattcacctcacagagttgaacattcctattgatagagcagtttggaaacactcttgttgtggaatgtgcaagtggagatttggagcgctttgaggcctatggtagtaaagggaatagcttcatagaaaaactagacagatgcattctcaggaactttttggtgatgtttgtattcaactcccagagttgaactttcctttggaaagagcagctatgaaacactctttttctagaatctgcaagtggacgtttggagggctttgtggtttgtggtggaaaaggaaatatcttcacctaaatactagatagaagcattctcaaaagcttctctgtgatgactgcattcaactcacggagttgaacactccttttgagagcgcagttttgaaactctctttctgtggcatccgcaaggggacatgtggacctctttgaatatttcgttggaaacggaatcatcttcacataaaaactatacagaagcagtctcagaatcttctttgtgatgtttgcattcaaatcccagagttgaactttcctttcaaagttcacgtttgaaacactctttttgcaggatgtacaagtggatatttggaccactctgtgtccttcgtgcgaaacgggtatatcttcacatgacatctagacagaagctttctcagaaaattctttgggatgattgagttgaactcacagagctgaacattccttgcgatgtagcagtttagaaacacactttctgcagaatctgcaagtgcatatttggatctctctgaggaattcgttggaaacgggataatttcagctgactaaacagaagcattctcagaaccttcttcgtgatgtctgcattcaactcacagtgtggaacctttctttgatagttcaggtttgaaacactctttttgtagaaactgcaaggggataatggcacttctttgaggcctaccgtagtaaaggaaataacttcctatagaaagaagacagaagcattctcagaaccctcttcgtgatgtttgcattcaactcacagtgctgaacctttctttgatagttcagctttgaaacactcttcttgtagaaactgcaagtggatatttggtcctctctgaggatttcgttggaaacgggataaaccgcacagaactaaacagaagaattctcagagccctcttcgtgatgtttgcattcaactcacagtgctgaacctttctttgatagtgcagctttgaaacactctttttgtagaaactgcaagtggatgtttggtcctctctgaggatttcgttggaaacgggataaaccgcacagaactaaaacagaagcattgtcagaaacttctttgtgatgattgcattcaactcacagagttgaaggttccttttcaaacagcagtttccaatcactctttctgtggaatctgcaagtggatatttgggcctctctgaggatttcgttggaaacgggataaaacgcacagaactaaaacagaagcattctcagaaacttctctgtgatgtttgtgttcaactcccagagtttcacgttgcttttcatagagtagttctgaaacatgcttttcgtagtgtctgcaagtggacatttggagcgctttcaggcctgtggtggaaaacgaattatggtcacataaaaactggagagaagccttctcagaaacttctctgtgatgattgcattcaactcacagagttgaaccctcctatggatagagcagtgttgaaactctctttttgtggaatctgcaagtggatatgtggacctctccgaagatgtctttggaaacgggaatatcttcacataaaaactaaacagaagcattctcagaaacttcttggtgatgtttgcattcaaatcccagagttgaaccttcctttgatagttcaggtttgaaacactctttctgtaggatctgcaagtggctatttggaccactctgtggccttcgttcgaaacgggtatatcttcgcataaaatctagacagaagcattctcagaaaatactttgtgatgattgagtttaaatcacagagctgaccattcctttggatggagcaggtttgagacacactttttgtagaatctacaagtggatatttggacctctctgaggatttcgttggaaacgggataactgcacctaactaaacggaaagcattctcagaaactgctttgtgatgattgcattcacctcacagagttgaacattcctattgatagagcagtttggaaacactcttgttgtggaatgtgcaagtggagatttggagcgctttgaggcctgtggtagtaaagggaatagcttcatagaaaaactagacagtgcattctcaggaactttttggtgatgtttgtattcaactcccagagttgaactttcctttggaaagagcagctatgaaacactctttttctagaatctgcaagtggacgtttggagggctttgtggtttgtggtggaaaaggaaatatacttcacctaaatactagatagaagcattctcagaagcttctctgtgatgactgcattcaactcacggagttgaacactccttttgagagcgcagttttggaactctctttctgtggcatctgcaaggggacatgtagacctctttgaagatttcgttgtaaacggaatcatcttcacataaaaactatacagaagcagtctcagaatcttctttgtgatgtttgcattcaaatcccagagttgaactttcctttccaagttcacgtttgaaacactctttttgcaggatctacaagtggatatttggaccactctgtgtccttcgttcgaaacgggtatatcttcacatgacatctagacagaagctttctcagaaaattctttgggatgattgagtggaactcacagagctgaacattccttgcgatgtagcagtttagaaacacactttctgcagaatctgcaagtgcatatttggacctctctgaggaattcgttggaaacgggataatttcagctgactaaacagaaagcattctcagaaccttcttcgtgatgtctgcattcaactcacagtgtggaacctttctttgatagttcaggtttgaaacactctttttgtagaaactgcaaggggataattgcacttctttgaggcctaccgtagtaaaggaaataacttcctatagaaagaagacagaagcattctcagagccctcttcgtgatgtttgcattcaactcacagtgctgaacctttctttgatagtgcagctttgaaacactctttttgtagaaactgcaagtggatgtttggtcctctctgaggatttcgttggaaacgggataaaccgcacagaactaaaacagaagcattgtcagaaacttctttgtgatgattgcattcaactcacagagttgaaggttccttttcaaacagcagtttccaatcactctttctgtggaatctgcaagtggatatttgggcctctctgaggatttcgttggaaacgggataaaacgcacagaactaaaacagaagcattctcagaaacttctctgtgatgtttgtgttcaactcccagagtttcacgttgcgtttcatagagtagttctgaaacatgcttttcgtagtgtctgcaagtggacatttggagcgctttcaggcctgtggtggaaaacgaattatggtcacataaaaactggagagaagccttctcagaaacttctctgtgatgattgcattcaactcacagagttgaaccctcctatggatagagcagtgttgaaactctctttttgtggaatctgcaagtggatatgtggacctctccgaagatgtctttggaaacgggaatatcttcacataaaaactaaacagaagcattctcagaaacttcttggtgatgtttgcattcaaatcccagagttgaaccttcctttgatagttcaggtttgaaacactctttctgtaggatctgcaagtggctatttggaccactctgtggccttcgttcgaaacgggtatatcttcgcataaaatctagacagaagcattctcagaaaatactttgtgatgattgagtttaaatcacagagctgaccattcctttggatggagcaggtttgagacacactttttgtagaatctacaagtggatatttggacctctctgaggatttcgttggaaacgggataactgcacctaactaaacggaagcattctcagaaactgctttgtgatgattgcattcacctcacagagttgaacattcctattgatagagcagtttggaaacactcttgttgtggaatgtgcaagtggagatttggagcgctttgaggcctatggtagtaaagggaatagcttcatagaaaaactagacagatgcattctcaggaacattttggtgatgtttgtattcaactcccagagttgaactttcctttggaaagagcagctatgaaacactctttttctagaatctgcaagtggacgtttggagggctttgtggtttgtggtggaaaaggaaatatcttcacctaaatactagatagaagcattctcagaagcttctctgtgatgactgcattcaactcacggagttgaacactccttttgagagcgcagttttgaaactctctttctgtggcatctgcaaggggacatgtagacctctttgaagatttcgttggaaacggaatcatcttcacataaaaactatacagaagcagtctcagaatcttctttgtgatgtttgcattcaaatcccagagttgaactttcctttcaaagttcacgtttgaaacactctttttgcaggatctacaagtggatatttggaccactctgtgtccttcgttcgaaacgggtatatcttcacacgacatctagacagaagctttctcagaaaattctttgggatgattgagtggaactcacagagctgaacattccttgcgatgtagcagtttagaaacacactttctgcagaatctgcaagtgcatatttggacctctctgaggaattcgttggaaacgggataatttcagctgactaaacagaagcattctcagaaccttcttcgtgatgtctgcattcaactcacagtgtggaacctttctttgatagttcaggtttgaaacactctttttgtagaaactgcaaggggataattgcacttctttgaggcctaccgtagtaaaggaaataacttcctatagaaagaagacagaagcattctcagaaccctcttcgtgatgtttgcattcaactcacagtgctgaacctttctttgatagttcagctttgaaacactcttcttgtagaaactgcaagtggatatttggtcctctctgaggatttcgttggaaacgggataaaccgcacagaactaaacagaagaattctcagagccctcttcgtgatgtttgcattcaactcacagtgctgaacctttctttgatagtgcagctttgaaacactctttttgtagaaactgcaagtggatgtttggtcctctctgaggatttcgttggaaacgggataaaccgcacagaactaaaacagaagcattcacagaaaactcttggtgacgactgagtttaactcacagagctgaacattcctttggatggagcagtttcgaaacacactctttgtagaatgtgcaagtggatatttgggcctctctgaggatttcgttggaaacgggataaaccgcacagaactaaaacagaagcattctgagaaactactttgtgatgattgcattcaagtcacagagctgaacattctctttgacagagcagtttggaaactctctttgtgtagaatctgcaagtggagatatggaatgctttgaggactatggtagtaaaggaaatagcttcatataaaagctagacagtagcattctcagaaacttctttgtgatgcttgcattcaaatcacagagttgaactttcctttcgagagagaagctttgaaacactctttttccagaatctgcaagtggacatttggagggctttgaggcctgtggtggaaaagcaattatcttcctgtaaaagctggatagaagcattgtcagaaacttctttgtgatgattgcattcaactcacagagttgaaggttccttttcaaacagcagtttccaaacactctttctgtggaatctgcaagtggatatttggacctctttgaagatttcgttggaaacgttataaccttcacagaaaagctaaacagaagcattctcagaaacttctctgtgatgtttgagttcaactcccagagtgtcacattgcttctcatagagtagttctgaaacatgcttttcgtagtgtctgcaaggggacatttggagcgctttcaggcctgtggtggaaaacgaattatggtcacataaaaactggagagaagccttctcagaaacttctctgtgatgattgcattcaactcacagagttgaaccctcctatggatagagcagtgttgaaactctctttttgtggaatctgcaagtggatatgtggacctctccgaagatgtctttggaaacgggaatatcttcacataaaaactaaacagaagcattctcagaaacttcttggtgatgtttgcattcaaatcccagagttgaaccttcctttgatagttcaggtttgaaacactctttttgtaggatctgcaagtggatatttggaccactctgtggccttcgttcgaaacgggtatatcttcgcataaaatctagacagaagcattctcagaaccttcttcgtgatgtttgcattcaactcacagtgttgaacctttctttgatagttcaggtttcaaacggtctttctgtagaaactgcaagtagatatttggacctctctgaggatttcgttggaaacgggataactgcacctaactaaacggaagcattcacagaaaactcttggtgacgactgagtttaactcacagagctgaacattcctttggatggagcagtttcgaaacacactatttgtagaatgtgcaagtggatatttaggcctctctgaggatttcgttggaaacgggataaaccgcacagaactaaacagaagcattctcagaaactactttgtgatgattgcattcaagtcacagagttgaacattccctttgacagagcagtttggaaactctctttgtgtagaatctgcaagtggagatatggaccgctttgaggcctatggtagtaaaggaaatagcttcatataaaagctagacagtagcattctcagaaacttctttgtgatgcttgcattcaactcacagagttgaactttcctttcgagagagaagctttgaaacactctttttccagaatctgcaagtggacatttggagggctttgaggcctgtggtggaaaaggaattatcttcccgtaaaagctagatagaagcattgtcagaaacttctttgtgatgattgcattcaagtcacagagttgaaggttccttttcaaagagcagtttccaatcacactttctgtggaatctgcaagtggatatttggacctctttgaagatttcgttggaaacgggagaatcttcacagaaaagctaaacagaagcattctcagaaacttctctgtgatgtttgtgttcaactcccagagtttcacgttgcttttcatagagtagttctgaaacatgcttttcgtagtgtctgcaagtggacatttggagcgctttcaggcctgtggtggaaaacgaattatggtcacataaaaactggagagaagccttctcagaaacttctctgtgatgattgcattcaactcacagagttgaaccctcctatggatagagcagtgttgaaactctctttttgtggaatctgcaagtggatatgtggacctctccgaagatgtctttggaaaagggaatatcttcacataaaaactaaacagaagcattctcagaaacttcttggtgatgtttgcattcaaatcccagagttgaaccttcctttgatagttcaggtttgaaacactctttttgtaggatctgcaagtggctatttggaccactctgtggccttcgttcgaaacgggtatatcttcgcataaaatctagacagaagcattctcagaaaatactttgtgatgattgagtttaaatcacagagctgaccattcctttggatggagcaggtttgagacacactttttgtagaatctacaagtggatatttggacctctctgaggatttcgttggaaacgggataactgcacctaactaaacggaagcattctcagaaactgctttgtgatgattgcattcacctcacagagttgaacattcctattgatagagcagtttggaaacactcttgttgtggaatgtgcaagtggagatttggagcgctttgaggcctatggtagtaaagggaatagcttcatagaaaaactagacagatgcattctcaggaactttttggtgatgtttgtattcaactcccagagttgaactttcctttggaaagagcagctatgaaacactctttttctagaatctgcaagtggacgtttggagggctttgtggtttgtggtggaaaaggaaatatcttcacctaaatactagatagaagcattctcagaagcttctctgtgatgactgcattcaactcacggagttgaacactccttttgagagcgcagttttgaaactctctttctgtggcatctgcaaggggacatgtagacctctttgaagatttcgttggaaacggaatcatcttcacataaaaactatacagaagcagtctcagaatcttctttgtgatgtttgcattcaaatcccagagttgaactttcctttcaaagttcacgtttgaaacactctttttgcaggatctacaagtggatatttggaccactctgtgtccttcgttcgaaacgggtatatcttcacacgacatctagacagaagctttctcagaaaattctttgggatgattgagtggaactcacagagctgaacattccttgcgatgtagcagtttagaaacacactttctgcagaatctgcaagtgcatatttggacctctctgaggaattcgttggaaacgggataatttcagctgactaaacagaagcattctcagaaccttcttcgtgatgtctgcattcaactcacagtgtggaacctttctttgatagttcaggtttgaaacactctttttgtagaaactgcaaggggataattgcacttctttgaggcctaccgtagtaaaggaaataacttcctatagaaagaagacagaagcattctcagaaccctcttcgtgatgtttgcattcaactcacagtgctgaacctttctttgatagttcagctttgaaacactcttcttgtagaaactgcaagtggatatttggtcctctctgaggatttcgttggaaacgggataaaccgcacagaactaaacagaagcattctcagagccctcttcgtgatgtttgcattcaactcacagtgctgaacctttctttgatagtgcagctttgaaacactctttttgtagaaactgcaagtggatgtttggtcctctctgaggatttcgttggaaacgggataaaccgcacagaactaaaacagaagcattgtcaggaaacttctttgtgatgattgcattcaactcacagagttgaaggttccttttcaaacagcagtttccaatcactctttctgtggaatctgcaagtggatatttgggcctctctgaggatttcgttggaaacgggataaaacgcacagaactaaaacagaagcattctcagaaacttctctgtgatgtttgtgttcaactcccagagtttcacgttgcttttcatagagtagttctgaaacatgcttttcgtagtgtctgcaagtggacatttggagcgctttcaggcctgtggtggaaaacgaattatggtcacataaaaactggagagaagccttctcagaaacttctctgtgatgattgcattcaactcacagagttgaaccctcctatggatagagcagtgttgaaactctctttttgtggaatctgcaagtggatatgtggacctctccgaagatgtctttggaaacgggaatatcttcacataaaaactaaacagaagcattctcagaaacttcttggtgatgtttgcattcaaatcccagagttgaaccttcctttgatagttcaggtttgaaacactctttctgtaggatctgcaagtggctatttggaccactctgtggccttcgttcgaaacgggtatatcttcgcataaaatctagacagaagcattctcagaaaatactttgtgatgattgagtttaaatcacagagctgaccattcctttggatggagcaggtttgagacacactttttgtagaatctacaagtggatatttggacctctctgaggatttcgttggaaacgggataactgcacctaactaaacggaagcattctcagaaactgctttgtgatgattgcattcacctcacagagttgaacattcctattgatagagcagtttggaaacactcttgttgtggaatgtgcaagtggagatttggagcgctttgaggcctatggtagtaaagggaatagcttcatagaaaaactagacagatgcattctcaggaactttttggtgatgtttgtattcaactcccagagttgaactttcctttggaaagagcagctatgaaacactctttttctagaatctgcaagtggacgtttggagggctttgtggtttgtggtggaaaaggaaatatattcacctaaatactagatagaagcattctcagaagcttctctgtgatgactgcattcaactcacggagttgaacactccttttgagagcgcagttttgaaactctctttctgtggcatctgcaaggggacatgtagacctctttgaagatttcgttggaaacggaatcatcttcacataaaaactatacagaagcagtctcagaatcttctttgtgatgtttgcattcaaatcccagagttgaactttcctttcaaagttcacgtttgaaacactctttttgcaggatctacaagtggatatttggaccactctgtgtccttcgttcgaaacgggtatatcttcacatgacatctagacagaagctttctcagaaaattgtttgggatgattgatttgaactcacagagctgagcattccttgcgatgtagcagtttagaaacacactttctgcagaatctgcaagtgcatatttggacctctctgaggaattcgttggaaacgggataatttcagctgactaaacagaagcattctcagaaccttcttcgtgatgtctgcattcaactcacagtgtggaacctttctttgatagttcaggtttgaaacactctttttgtagaaactgtaaggggataattgcactctttgaggagtaccgtagtaaaggaaataacttcctataaaaagaagacagaagcattctcagaaccctcttcgtgatgtttgcattcaactcacagtgctgaacctttctttgatagttcagctttgaaacactctttttgtagaaactgcaagtggatatttggtcctctctgaggatttcgttggaaaagggataaaacgcacagaactaaacagaagcattcacagaaaactcttggtgacgactgagtttaactcacagagctgaacattcctttggatggagcagtttcaaaacacactatttgtagaatctgcaagtggatatgtgggcctctctgaggatttcgttggaaacgggataaaccgcacagaactaaaacagaagcattctcagaaactactttgtgatgattgcattcaagtcacagagttgaacattccctttgacagagcagtttggaaactctctttgtgtagaatctgaaagtggagatatggaccgctttgaggcctatggtagtaaaggaaatagcttcatataaaagctagacagtagcattctcagaaacttctttgtgatgcttgcattcaactcacagagttgaactttcctttcgagagagaagctttgaaacactctttttccagaatgtgcaagtggacatttggagggctttgaggcctgtggtggaaaaggaattatcttcccgtaaaagctagatagaagcattgtcagaaacttctttgtgatgattgcattcaagtcacagagttgaaggttccttttcaaagagcagtttccaatcactctttctgtggaatctgcaagtggatatttggacctctttgaagatttcgttggaaacgggagaatcttcacagaaaagctaaacagaagcattctcagaaacttctctgtgatgtttgtgttcaactcccagagtttcacattgcttttcatagagtagttctgaaacatgcttttcgtagtgtctgcaagtggacatttggagcgctttcaggcctgtggtggaaaacgaattatggtcacataaaaactggagagaagccttctcagaaacttctctgtgatgattgcattcaactcacagagttgaaccctcctatggatagagcagtgttgaaactctctttttgtggaatctgcaagtggatatgtggacctctccgaagatgtctttggaaacgggaatatcttcacataaaaactaaacagaagcattctcagaaacttcttggtgatgtttgcattcaaatcccagcagttgaaccttcctttgatagttcaggtttgaaacactctttctgtaggatctgcaagtggctatttggaccactctgtggccttcgttcgaaacgggtatatcttcgcataaaatctagacagaagcattctcagaaaatactttgtgatgattgagtttaactcacagagctgaacattcctttggatggagcaggtttgagacacaccttttgtagaatctacaagtggatatttggacctctctgaggatttcgttggaaacgggataactgcacctaactaaacggaagcattctcagaaactgctttgtgatgattgcattcacctcacagagttgaacattcctattgatagagcagtttggaaacactcttgttgtggaatgtgcaagtggagatttggagcactttgaggcctatggtagtaaagggaatagcttcatagaaaaactagacagatgcattctcaggaactttttggtgatgtttgtattcaactcccagagttgaactttcctttggaaagagcagctatgaaacactctttttctagaatctgcaagtggacgtttggagggctttgtggtttgtggtggaaaaggaaatatcttcacctaaatactagatagaagcattctcagaagcttctctgtgatgactgcattcaactcacggagttgaacactccttttgagagcgcagttatgaaactccctttctctggcatctgcaaggggacatgtagacctctttgaagatttcgttggaaacggaatcatcttcacatcaaaactatacagaagcagtctcagaatcttctttgtgatgtttgcattcaaatcccagagttgaactttcctttcaaagttcacgtttgaaacactctttttgcaggatctacaagtggatatttggaccactctgtgtccttcgttcgaaacgggtatatcttcacacgacatctagacagaagctttctcagaaaattctttgggatgattgagtggaactcacagagctgaacattccttgcgatgtagcagtttagaaacacactttctgcagaatctgcaagtgcatatttggacctctctgaggaattcgttggaaacgggataatttcagctgactaaacagaagcattctcagaaccttcttcgtgatgtctgcattcaactcacagtgtggaacctttctttgatagttcaggtttgaaacactctttttgtagaaactgcaaggggataattgcacttctttgaggcctaccgtagtaaaggaaataacttcctatagaaagaagacagaagcattctcagaaccctcttcgtgatgtttgcattcaactcacagtgctgaacctttctttgatagttcagctttgaaacactcttcttgtagaaactgcaagtggatatttggtcctctctgaggatttcgttggaaatgggataaaccgcacagaactaaacagaagcattctcagaaccttcttcgtgatgtttgcattcaactcacagtgttgaacttttctttgatagttcaggttggaaacggtctttctgtagaaactgcaagtagatatttggacctctctgaggatttcgttggaaacgggataaaccgcacagaactaaaacagaagcattcacagaaaactcttggtgacgactgagttcaactcacagagctgaacattcctttggatggagccgtttcgaaacacactatttgtagaatgtgcaagtggatatttgggcctctctgaggatttcgttggaaaagggataaaccgcacagaactaaaacagaagcattctcagaaactactttgtgatgattgcattcaagtcacagagttgaacattccctttgacagagcagtttggaaactctctttgtgtagaatctgcaagtggagatatagaccgctttgaggcctatggtagtaaaggaaatagcttcatataaaagctagacagtagcattctcagaaacttctttgtgatgcttgcattcaactcacagagttgaactttcctttcgagagagaagctttgaaacactctttttccagaatctgcaagtggacatttggagggctttgaggcctgtggtggaaaaggaattaacttcccgtaaaagctagatagaagcattgtcagaaacttctttgtgatgattgcattcaactcacagagttgaaggttccttttcaaacagcagtttccaatcactctttctgtggaatctgcaagtggatatttgggcctctctgaggatttcgttggaaacgggataaaacgcacagaactaaaacagaagcattctcagaaacttctctgtgatgtttgtgttcaactcccagagtttcacgttgcttttcatagagtagttctgaaacatgcttttcgtagtgtctgcaagtggacatttggagcgctttcaggcctgtggtggaaaacgaattatggtcacataaaaactggagagaagccttctcagaaacttctctgtgatgattgcattcaactcacagagttgaaccctcctatggatagagcagtgttgaaactctctttttgtggaatctgcaagtggatatgtggacctctccgaagatgtctttggaaacgggaatatcttcacataaaaactaaacagaagcattctcagaaacttcttggtgatgtttgcattcaaatcccagagttgaaccttcctttgatagttcaggtttgaaacactctttctgtaggatctgcaagtggctatttggaccactctgtggccttcgttcgaaacgggtatatcttcgcataaaatctagacagaagcattctcagaaaatactttgtgatgattgagtttaaatcacagagctgaccattcctttggatggagcaggtttgagacacactttttgtagaatctacaagtggatatttggacctctctgaggatttcgttggaaacgggataactgcacctaactaaacggaagcattctcagaaactgctttgtgatgattgcattcacctcacagagttgaacattcctattgatagagcagtttggaaacactcttgttgtggaatgtgcaagtggagatttggagcgctttgaggcctatggtagtaaagggaatagcttcatagaaaaactagacagatgcattctcaggaactttttggtgatgtttgtattcaactcccagagttgaactttcctttggaaagagcagctatgaaacactctttttctagaatctgcaagtggacgtttggagggctttgtggtttgtggtggaaaaggaaatatcttcacctaaatactagatagaagcattctcagaagcttctctgtgatgactgcattcaactcacggagttgaacactccttttgagagcgcagttttgaaactctctttctgtggcatctgcaaggggacatgtagacctctttgaagatttcgttggaaacggaatcatcttcacataaaaactatacagaagcagtctcagaatcttctttgtgatgtttgcattcaaatcccagagttgaactttcctttcaaagttcacgtttgaaacactctttttgcaggatctacaagtggatatttggaccactctgtgtccttcgttcgaaacgggtatatcttcacacgacatctagacagaagctttctcagaaaattctttgggatgattgagtggaactcacagagctgaacattccttgcgatgtagcactttagaaacacactttctgcagaatctgcaagtgcatatttggacctctctgaggaattcgttggaaacgggataatttcagctgactaaacagaagcattctcagaaccttcttcgtgatgtctgcattcaactcacaagtgtggaacctttctttgatagttcaggtttgaaacactctttttgtagaaactgcaaggggataattgcacttctttgaggcctaccgtagtaaaggaaataacttcctatagaaagaagacagaagaactctcagagccctcttcgtgatgtttgcattcaactcacagtgctgaacctttctttgatagtgcagctttgaaacactctttttgtagaaactgcaagtggatatttggtcctctctgaggatttcgttggaaacgggataaaacgcacagaactaaaacagaagcattcacagaaaactcttggtgacgactgagtttaactcacagagctgaacattcctttggatggagcagtttcgaaacacactatttgtagaatctgcaagtggatatttgggcctctctgaggatttcgttggaaacgggataaaacgcacagaactaaaacagaagcattctcagaaactactttgtgatgattgcattcaagtcacagagttgaacattccctttgacagagcagtttggaaactctctttgtgtagaatctgcaagtggagatatggaccgctttgaggcctatggtagtaaaggaaatagcttcatataaaagctagacagtagcattctcagaaacttctttgtgatgcttgcattcaactcacagagttgaactttcctttcgagagagaagctttgaaacactctttttccagaatgtgcaagtggacatttggggagctttgaggcctggggtggaaaaggaattatcttcccgtaaaagctagatagaagcattgtcagaaacttctttgagatgattgcattcaactcacagagttgaaggttccttttcaaacagcagtttccaatcactctttctgtggaatctgcaagtggatatttcgacctctttgaagatttcgttggaaacgggagaatcttcacagaaaagctaaacagaagcattctcagaaacttctctgtgatgtttgtgttcaactcccagagtttcacgttgcttttcatagagtagttctgaaacatgcttttcgtagtgtctgcaagtggacatttggagcgctttcaggcctgtggtggaaaacgaattatggtcacataaaaactggagagaagccttctcagaaacttctctgtgatgattgcattcaactcacagagttgaaccctcctatggatagagcagtgttgaaactctctttttgtggaatctgcaagtggatatgtggacctctccgaagatgtctttggaaacgggaatatcttcacataaaaactaaacagaagcattctcagaaacttcttggtgatgtttgcattcaaatcccagagttgaaccttcctttgatagttcaggtttgaaacactctttttgtaggatctgcaagtggctatttggaccactctgtggccttcgttcgaaacgggtatatcttcgcataaaatctagacagaagcattctcagaaaatactttgtgatgattgagttgaactcacagagctgaacattcctttggatggagcaggtttgagacacactttttgtagaatctacaagtggatatttggacctctctgaggatttcgttggaaacgggataactgcacctaactaaacggaagcattctcagaaactgctttgtgatgattgcattcacctcacagagttgaacattcctattgatagagcagtttggaaacactcttgttgtggaatgtgcaagtggagatttggagcgctttgaggcctatggtagtaaagggaatagcgtcatagaaaaattagacagatgcattctcaggaactttttggtgatgtttgtattcaactcccagagttgaactttcctttggaaagagcagctatgaaacactctttttctagaatctgcaagtggacgtttggagggctttgtggtttgtggtggaaaaggaaatatcttcacctaaatactagagagaagcattctcagaagcttctctgtgatgactgcattcaactcacggagttgaacactccttttgagagcgcagttttgaaactctctttctgtggcatccgcaaggggacatgtagacctctttgaagatttcgttggaaacggaatcatcttcacataaaaactatacagaagcagtctcagaatcttctttgtggtgtttgcattcaaatcccagagttgaactttcctttcaaagttcacgtttgaaacactctttttgcaggatctacaagtggatatttggaccactctgtgtccttcgttcgaaacgggtatatcttcacatgacatctagacagaagctttctcagaaaatcctttgggatgattgagtggaactcacagagctgaacattccttgcgatgtagcagtttagaaacacactttctgcagaatctgcaagtgcatatttggacctctctgaggaattcgttggaaacgggataatttcagctgactaaacagaagcattttcagaaccttcttcgtgatgtctgcattcaagtcacagtgtggaacctttctttgatagttcaggtttgaaacactctttttgtagaaactgcaaggggataattgcactctttgaggagtaccgtagtaaaggaaatatcttcctataaaaagaagacagaagcattctcagaaccctcttcgtgatgtttgcattcaactcacagtgctgaacctttctttgatagttcagctttgaaacactctttttgtagaaactgcaagtgaatatttggtcctctctgaggatttcgttggaaatgggataaaacgcacagaactaaacagaagcattctcagaaccttcttcgtgatgtttgcattcaactcacagtgttgaacctttctttgatagttcaggtttgaaacggtctttctgtagaaactgcaagtagatatttggacctctctgaggatttcgttggaaacgggataaaccgcacagaactaaaacagaagcattcacagaaaactcttggtgacgactgagtttaactcacagagctgaacattcctttggatggagcagtttcgaaacacactatttgtataatgtgcaagtggatatatgggcctctctgaggatttcgttggaaacgggataaaccgcacagaactaaacagaagcattctcagaaactactttgtgatgattgcattcaagtcacagagttgaacattccctttgacagagcagtttggaaactctctttgtgtagaatctgcaagtggagatatggaccgctttgaggcctatggtagtaaaggaaatagcttcatataaagctagacagtagcattctcagaaacttctttgtgatgcttgcattcaactcacagagttgaactttcctttcgagagagaagctttgaaacactctttttccagaatgtgcaagtggagatttggagggctttgaggcctgtggtggaaaaggaattatcttcccgtaaaagctagatagaagcattgtcagaaacttctgtgtgatgattgcattcaactcacagagttgaaggttccttttcaaacagcagtttccaatcactctttgtgtggaatctgcaagtggatatttggacctattttgaagatttcgttggaaacgggataatcttcacagaaaagctaaacagaagcattctcagaaacttctctgtgatgtttgtgttcaactcccagagtttcacattgcttttcatagagtacttctgaaacatgcttttcgtagtgtctgcaagtggacatttggagcgctctcaggcctgtggtggaaaacgaattatggtcacataaaaactggagagaagccttctcagaaacttctctgtgatgattgcattcaactcacagagttgaaccctcctatggatagagcagtgttgaaactctctttttgtggaatctgcaagtggatatgtggacctctccgaagatgtctttggaaacgggaatatcttcacataaaaactaaacagaagcattctcagaaacttcttggggatgtttgcattcaaatcccagagttgaaccttcctttgatagttcaggtttgaaacactctttttgtaggatctgcaagtggctatttggaccactctgtggccttcgttcgaaacgggtatatcttcgcataaaatctagacagaagcattctcagaaaatactttgtgatgattgagttgaactcacagagctgaacattcctttggatggagcaggtttgagacacactttttgtagaatctacaagtggatatttggacctctctgaggatttcgttggaaacgggataactgcacctaactaaacggaagcattctcagaaactgctttgtgatgattgcattcacctcacagagttgaacattcctattgatagagcagtttggaaacactcttgttgtggaatgtgcaagtggagatttggagcgctttgaggcctatggtagtaaagggaatagcttcatagaaaaactagacagatgcattctcaggaactttttggtgatgtttgtattcaactcccagagttgaactttcctttggaaagagcagctatgaaacactctttttctagaatctgcaagtggacgtttggagggctttgtggtttgtggtggaaaaggaaatatcttcacctaaatactagatagaagcattctcagaagcttctctgtgatgactgcattcaactcacggagttgaacactccttttgagagcgcagttttgaaactctctttctgtggcatctgcaaggggacatgtagacctctttgaagatttcgttggaaacggaatcatcttcacataaaaactatacagaagcagtctcagaatcttctttgtgatgtttgcattcaaatcccagagttgaactttcctttcaaagttcacgtttgaaacactctttttgcaggatctacaagtggatatttggaccactctgtgtccttcgttcgaaacgggtatatcttcacacgacatctagacagaagctttctcagaaaattctttgggatgattgagtggaactcacagagctgaacattccttgcgatgtagcagtttagaaacacactttctgcagaatctgcaagtgcatatttggacctctgtgaggaattcgttggaaacgggataatttcagctgactaaacagaagcattctcagaaccttcttcgtgatgtctgcattcaactcacagtgtggaacctttctttgatagttcaggtttgaaacactctttttgtagaaactgcaaggggataattgcacttctttgaggcctaccgtagtaaaggaaataacttcctatagaaagaagacagaagcattctcagaaccctcttcgtgatgtttgcattcaactcacagtgctgaacctttctttgatagttcagctttgaaacactcttcttgtagaaactgcaagtggatatttggtcctctctgaggatttcgttggaaacgggataaaccgcacagaactaaacagaagaattctcagagccctcttcgtgatgtttgcattcaactcacagtgctgaacctttctttgatagtgcagctttgaaacactctttttgtagaaactgcaagtggatgtttggtcctctctgaggatttcgttggaaacgggataaaccgcacagaactaaaacagaagcattgtcagaaacttctttgtgatgattgcattcaactcacagagttgaaggttccttttcaaacagcagtttccaatcactctttctgtggaatctgcaagtggatatttgggcctctctgaggatttcgttggaaacgggataaaacgcacagaactaaaacagaagcattctcagaaacttctctgtgatgtttgtgttcaactcccagagtttcacgttgcttttcatagagtagttctgaaacatgcttttcgtagtgtctgcaagtggacatttggagcgctttcaggcctgtggtggaaaacgaattatggtcacataaaaactggagagaagccttctcagaaacttctctgtgatgattgcattcaactcacagagttgaaccctcctatggatagagcagtgttgaaactctctttttgtggaacctgcaagtggatatgtggacctctccgaagatgtctttggaaacgggaatatcttcacataaaaactaaacagaagcattctcagaaacttcttggtgatgtttgcattcaaatcccagagttgaaccttcctttgatagttcaggtttgaaacactctttctgtaggatctgcaagtggctatttggaccactctgtggccttcgttcgaaacgggtatatcttcgcataaaatctagacagaagcattctcagaaaatactttgtgatgattgagtttaaatcacagagctgaccattcctttggatggagcaggtttgagacacactttttgtagaatctacaagtggatatttggacctctctgaggatttcgttggaaacgggataactgcacctaactaaacggaagcattctcagaaactgctttgtgatgattgcattcacctcacagagttgaacattcctattgatagagcagtttggaaacactcttgttgtggaatgtgcaagtggagatttggagcgctttgaggcctatggtagtaaagggaatagcttcatagaaaaactagacagatgcattctcaggaactttttggtgatgtttgtattcaactcccagagttgaactttcctttggaaagagcagctatgaaacactctttttctagaatctgcaagtggacgtttggagggctttgtggtttgtggtggaaaaggaaatatcttcacctaaatactagatagaagcattctcagaagcttctctgtgatgactgcattcaactcacggagttgaacactcctttagagagcgcagttttgaaactctctttctgtggcatctgcaaggggacatgtagacctctttgaagatttcgttggaaacggaatcatcttcacataaaaactatacagaagcagtctcagcatcttctttgtgatgtttgcattcaaatcccaggagttgaactttcctttcaaagttcacgtttgaaacactctttttgcaggatctacaagtggatatttggaccactctgtgtccttcgttcgaaacgggtatatcttcacatgacatctagacagaagctttctcagaaaattctttgggatgattgagttgaactcacagagctgagcattccttgcgatgtagcagtttagaaacacactttctgcagaatctgcaagtgcatatttggacctctgtgaggaattcgttggaaacgggataatttcagctgactaaacagaagcattctcagaaccttcttcgtgatgtctgcattcaactcacagtgtggaacctttctttgatagttcaggtttgaaacactctttttgtagaaactgcaaggggataattgcactctttgaggagtaccgtagtaaaggaaataacttcctataaaaagaagacagaagcattctcagaaccctcttcgtgatgtttgcattcaactcacagtgctgaacctttctttgatagttcagctttgaaacactctttttgtagaaactgcaagtggatatttggtcctctctgaggatttcgttggaaacgggataaactgcacagaactaaacagaagcattctcagaaccttcttcgtgatgtttgcattcaactcacagtgttgaacctttctttgatagttcaggtttgaaacggtctttctgtagaaactgcaagtagatatttggacctctctgaggatttcgttggaaacgggataacccgcacagaactaaaacagaagcattcacagaaaactcttggtgacgactgagtttaactcacagagctgaacattcctttggatggagcagtttcgaaacacactatttgtagaatgtgcaagtggatatttaggcctctctgaggatttcgttggaaacgggataaaccgcacagaactaaacagaagcattctcagaaactactttgtgatgattgcattcaagtcacagagttgaacattccctttgacagagcagtttggaaactctctttgtgtagaatctgcaagtggagatatggaccgctttgaggcctatggtagtaaaggaaatagcttcatataaaagctagacagtagcattctcagaaacttctttgtgatgcttgcattcaactcacagagttgaactttcctttcgagagagaagctttgaaacactctttttccagaatctgcaagtggacatttgaagggctttgaggcctgtggtggaaaaggaattatcttcccgtaaaagctagatagaagcattgtcagaaacttctttgtgatgattgcattcaactcacagagttgaaggttccttttcaaacagcagtttccaatcactctttctgtggaatctgcaagtggatatttggacctctttgaagatttcgttggaaacgggagaatcttcacagaaaagctaaacagaagcattctcagaaacttctctgtgatgtttgtgttcaactcccagagtttcacattgcttttcatagagtagttctgaaacatgcttttcgtagtgtctgcaagtggacatttggagcgctttcaggcctgtggtggaaaacgaattatggtcacataaaaactggagagaagccttctcagaaacttctctgcgatgattgcattcaactcacagagttgaaccctcctatggatagagcagtgttgaaactctctttttgtggaatctgcaagtggatatgtggacctctccgaagatgtctttggaaacgggaatatcttcacatagaaactaaacagaagcattctcagaaacttcttggtgatgtttgcattcaaatcccagagttgaaccttcctttgatagttcaggtttgaaacactctttttgtaggatctgcaagtggatatttggaccactctgtggccttcgttcgaaacgggtacatcttcgcataaaatctagacagaagcattctcagaaaatactttgtgatgattgagttgaactcacagagctgaacattcctttggatggagcaggtttgagacacactttttgtagaatctacaagtggatatttggacctctctgaggatttcgttggaaacgggataactgcacctaactaaacggaagcattctcagaaactgctttgtgatgattgcattcacctcacagagttgaacattcctattgatagagcagtttggaaacactcttgttgtggaatgtgcaagtggagatttggagcgctttgaggcctatggtagtaaagggaatagcttcatagaaaaactagacaggatgcattctcaggaactttttggtgatgtttgtattcaactcccagagttgaactttcctttggaaagagcagctatgaaacactctttttctagaatctgcaagtggacgtttggagggctttgtggtttgtggtggaaaaggaaatatcttcacctaaatactagatagaagcattctcagaagcttctctgtgatgactgcattcaactcacggagttgaacactccttttgagagcgtagttttgaaactctctttctgtggcatctgcaaggggacatgtagacctctttgaagatttcgttggaaacggaatcatcttcacataaaaactatacagaagcagtctcagaatcttctttgtgatgtttgcattcaaatcccagagttgaactttcctttcaaagttcacgtttgaaacactctttttgcaggatctacaagtggatatttggagcactctgtgtccttcgttcgaaacgggtatatcttcacatgacatctagacagaagctttctcagaaaattctttgggatgattgagtggaactcacagagctgaacattccttgcgatgtagcagtttagaaacacactttctgcagaatctgcaagtgcatatttggacctctctgaggaattcgttggaaacgggataatttcagctgactaaacagaagcattctcagaaccttcttcgtgatgtctgcattcaactcacagtgtggaacctttctttgatagttcaggtttgaaacactctttttgtagaaactgcaaggggataattgcacttctttgaggcctaccgtagtaaaggaaataacttcctatagaaagaagacagaagcattctcagaaccctcttcgtgatgtttgcattcaactcacagtgctgaacctttctttgatagttcagctttgaaacactcttcttgtagaaactgcaagtggatatttggtcctctctgaggatttcgttggaaacgggataaaccgcacagaactaaacagaagaattctcagagccctcttcgtgatgtttgcattcaactcacagtgctgaacctttctttgatagtgcagctttgaaacactctttttgtagaaactgcaagtggatgtttggtcctctctgaggatttcgttggaaacgggataaaccgcacagaactaaaacagaagcattgtcagaaacttctttgtgatgattgcattcaactcacagagttgaaggttccttttcaaacagcagtttccaatcactctttctgtggaatctgcaagtggatatttgggcctctctgaggatttcgttggaaacgggataaaacgcacagaactaaaacagaagcattctcagaaacttctctgtgatgtttgtgttcaactcccagagtttcacgttgcttttcatagagtagttctgaaacatgcttttcgtagtgtctgcaagtggacatttggagcgctttcaggcctgtggtggaaaacgaattatggtcacataaaaactggagagaagccttctcagaaacttctctgtgatgattgcattcaactcacagagttgaaccctcctatggatagagcagtgttgaaactctctttttgtggaatctgcaagtggatatgtggacctctccgaagatgtctttggaaacgggaatatcttcacataaaaactaaacagaagcattctcagtaaacttcttggtgatgtttgcattcaaatcccagagttgaaccttcctttgatagttcaggtttgaaacactctttttgtaggatctgcaagtggatatttggaccactctgtggccttcgttcgaaacgggtatatcttcgcataaaatctagacagaagcattctcagaaaatactttgtgatgattgagtttaactcacagagctgaacattcctttggatggagcaggcttgagacacactttttgtagaatccacaagtggatatttggacctctctgaggatttcgttggaaacgggataactgcaccgaactaaacggaagcattctcagaaactgctttgtgatgattgcattcacctcacagagttgaacattcctattgatagagcagtttggaaacactcttgttgtggaatgtgcaagtggagatttggagcgctttgaggcctatggtagtaaagggaatagcttcatagaaaaactagacagatgcattctcaggaactttttggtgatgtttgtattcaactcccagagttgaactttcctttggaaagagcagctatgaaacactctttttctagaatctgcaagtggacgtttggagggctttgtggtttgtggtggaaaaggaaatatcttcacctaaatactagagagaagcattctcagaagcttctctgtgatgactgcattcaactcacggagttgaacactccttttgagagcgcagttttgaaactctctttctgtggcatccgcaaggggacatgtggacctcctttgaagatttcgttggaaacggaatcatcttcacataaaaactatacagaagcagtctcagaatcttctttgtgatgtttgcattcaaatcccagagttgaactttcctttcaaagttcacgtttgaaacactctttttgcaggatctacaagtggatatttggaccactctgtgtccttcgttcgtaacgggtatatcttcacatgacatctagacagaagctttctcagaaaattctttgggatgattgagtggaactcacagagctgaacattccttgtgatgtagcagtttagaaacacactttctgcagaatctgcaagtgcatatttggacctctctgaggagttcgttggaaacgggataatttcagctgactaaacagaaacattctcagaaccttcttcgtgatgtctgcattcaactcacagtgtggaacctttctttgatagttcaggtttgaaacactctttttgtagaaacttcaaggggataattgcacttctttgaggcctaccgtagtaaaggaaataacttcctatagaaagaagacagaagcattctcagaaccctcttcgtgatgtttgcattcaactcacagtgctgaacctttctttgatagttcagctttgaaacactcttcttgtagaaactgcaagtggatatttggtcctctctgaggatttcgttggaaacgggataaaccgcacagaactaaacagaagcattctcagaaccttcttcgtgatgtttgcattcaactcacagtgttgaacctttctttgatagttcaggttggaaacggtctttatgtagaaactgcaagtagatatttggacctctctgaggatttcgttggaaacgggataaaccgcacagaactaaaacagaagcattcacagaaaactcttggtgacgactgagtttaactcacagagctgaacattcctttggatggagcagtttcgaaacacactatttgtagaatgtgcaagtggatatttaggcctctctgaggatttcgttggaaacgggataaaccgcacagaactaaacagaagcattctcagaaactactttgtgatgattgcattcaagtcacagagttgaacattccctttgacagagcagtttggaaactctctttgtgtagaatctgcaagtggagatatggaccgctttgaggcctatggtagtaaaggaaatagcttcatataaaagctagacagtagcattctcagaaacttctttgtgatgcttgcattcaactcacagagttgaactttcctttcgagagagaagctttgaaacactctttttccagaatctgcaagtggacatttggagggctttgaggcctgtggtggaaaaggaattatcttcccgtaaaagctagatagaagcattgtcagaaacttctttgtgatgattgcattcaactcacagagttgaaggttccttttcaaagagcagtttccaatcactctttctgtggaatctgcaagtggatatttggacctattttgaagatttcgttggaaacgggagaatcttcacaggaaagctaaacagaagcattctcagaaacttctcctgtgatgtttgtgttcaactcccagagtttcacgttgcttttcatagagtagttctgaaacatgcttttcgtagtgtctgcaagtggacatttggagcgctttcaggcctgtggtggaaaacgaattatggtcacataaaaactggagagaagccttctcagaaacttctctgtgatgattgcattcaactcacagagttgaaccctcctatggatagagcagtgttgaaactctctttttgtggaatctgcaagtggatatgtggacctctccgaagatgtctttggaaacgggaatatcttcacataaaaactaaacagaagcattctcagaaacttcttggtgatgtttgcattcaaatcccagagttgaaccttcctttgatagttcaggtttgaaacactctttttgtaggatctgcaagtggctatttggaccactctgtggccttcgttcgaaacgggtatatcttcgcataaaatctagacagaagcattctcagaaaatactttgtgatgattgagtttaactcacagagctgaacattcctttggatggagcaggtttgagacacactttttgtagaatctgcaagtggatatttggacctctctgaggatttcgttggaaacgggataactgcacctaactaaacggaagccttctcagaaactgctttgtgatgattgcattcacctcacagagttgaacattcctattgatagagcagtttggaaacactcttgttgtggaatgtgcaagtggagatttggagcgctttgaggcctatggtagtaaagggaagagcttcatagaaaaacaagacagatgcattctcaggaactttttggtgatgtttgtattcaactcccagagttgaactttcctttggaaagagcagctatgaaacactctttttctagaatctgcaagtggacgtttggagggctttgtggtttgtggtggaaaaggaaatatcttcacctaaatactagatagaagctttctcagaagcttctctgtgatgactgcattgaactcacggagttgaacactccttttgagagcgcagttttgaaactccctttctgtggcatctgcaaggggacatgtagacctctttgaagatttcgttggaaacggaatcatcttcacataaaaactatacagaagtagtctcagaatcttctttgtgatgtttgcattcaaatcccagagttgaactttcctttcaaagttcacgtttgaaacactctttttgcaggatctacaagtggatatttggaccactctgtgtccttcgttcgaaacgggtatatcttcacacgacatctagacagaagctttctcagaaaattctttgggatgattgagtagaactcacagagctgaacattcctttggatggagcagtttcgaaacacactctttgtaaaatctgcaagtggatatttcggcctctctgaggatttcgttggaaacgggataaaccgcacagaactgaaacagaagcattctcagaaccttcttcgtgatgtctgcattcaactcacagtgtggaacctttctttgatagttcaggtttgaaacactctttttgtagaaactgcaaggggataattgcacttctttgaggcctaccgtagtaaaggaaataacttcctataaaaagaagacagaagcattctcagaaccctcttcgtgatgtttgcattcaactcacagtgctgaacctttctttgatagttcagctttgaaacactcttcttgtagaaactgcaagtggatatttggtcctctctgaggatttcgttggaaacgggataaaccgcacagaactaaacagaagaattctcagagccctcttcgtgatgtttgcattcaactcacagtgctgaacctttctttgatagtgcagctttgaaacactctttttgtagaaactgcaagtggatgtttggtcctctctgaggatttcgttggaaacgggataaaccgcacagaactaaaacagaagcattgtcagaaacttctttgtgatgattgcattcaactcacagagttgaaggttccttttcaaacagcagtttccaatcactctttctgtggaatctgcaagtggatatttgggcctctctgaggatttcgttggaaacgggataaaacgcacagaactaaaacagaagcattctcagaaacttctctgtgatgtttgtgttcaactcccagagtttcacgttgcttttcatagagtagttctgaaacatgcttttcgtagtgtctgcaagtggacatttggagcgctttcaggcctgtggtggaaaacgaattatggtcacataaaaactggagagaagccttctcagaaacttctctgtgatgattgcattcaactcacagagttgaaccctcctatggatagagcagtgttgaaactctctttttgtggaatctgcaagtggatatgtggacctctccgaagatgtctttggaaacgggaatatcttcacataaaaactaaacagaagcattctcagaaacttcttggtgatgtttgcattcaaatcccagagttgagccttcctttgatagttcaggtttgaaacactctttctgtaggatctgcaagtggctatttggaccactctgtggccttcgttcgaaacgggtatatcttcgcataaaatctagacagaagcattctcagaaaatactttgtgatgattgagtttaaatcacagagctgaccattcctttggatggagcaggtttgagacacactttttgtagaatctacaagtggatatttggacctctctgaggatttcgttggaaacgggataactgcacctaactaaacggaagcattctcagaaactgctttgtgatgattgcattcacctcacagagttgaccattcctattgatagagcagtttggaaacactcttgttgtggaatgtgcaagtggagatttggagcgctttgaggcctatggtagtaaagggaatagcttcatagaaaaactagacagatgcattctcaggaactttttggtgatgtttgtattcaactcccagagttgaactttcctttggaaagagcagctatgaaacaccctttttctagaatctgcaagtggacgtttggagggctttgtggtttgtggtggaaaaggaaatatcttcacctaaatactagatagaagcattctcagaagcttctctgtgatgactgcattcaactcacggagttgaacactccttttgagagcgcagttttgaaactctctttctgtggcatctgcaaggggacatgtagacctctttgaagatttcgttggaaacggaatcatcttcacataaaaactatacagaagcagtctcagaatcttctttgtgatgtttgcattcaaatcccagagttgaactttcctttcaaagttcacgtttgaaacactctttttgcaggatctacaagtggatatttggaccactctgtgtccttcgttcgaaacgggtatatcttcacacgacatctagacagaagctttctcagaaaattctttgggatgattgagtggaactcacagagctgaacattccttgcgatgtagcagtttagaaacacactttctgcagaatctgcaagtgcatatttggacctctctgaggaattcgttggaaacgggataatttcagctgactaaacagaagcattctcagaaccttcttcgtgatgtctgcattcaactcacagtgtggaacctttctttgatagttcaggtttgaaacactctttttgtagaaactgcaaggggataattgcacttctttgaggcctaccgtagtaaaggaaataacttcctatagaaagaagacagaagcattctcagaaccctcttcgtgatgtttgcattcaactcacagtgctgaacctttctttgatagttcagctttgaaacactcttcttgtagaaactgcaagtggatatttggtcctctctgaggatttcgttggaaacgggataaaccgcacagaactaaacagaagaattctcagagccctcttcgtgatgtttgcattcaactcacagtgctgaacctttctttgatagtgcagctttgaaacactctttttgtagaaactgcaagtggatgtttggtcctctctgaggatttcgttggaaacgggataaaccgcacagaactaaaacagaagcattgtcagaaacttctttgtgatgattgcattcaactcacagagttgaaggttccttttcaaacagcagtttccaatcactctttctgtggaatctgcaagtggatatttgggcctctctgaggatttcgttggaaacgggataaaacgcacagaactaaaacagaagcattctcagaaacttctctgtgatgtttgtgttcaactcccagagtttcacgttgcttttcatagagtagttctgaaacatgcttttcgtagtgtctgcaagtggacatttggagcgctttcaggcctgtggtggaaaacgaattatggtcacataaaaactggagagaagccttctcagaaacttctctgtgatgattgcattcaactcacagagttgaaccctcctatggatagagcagtgttgaaactctctttttgtggaatctgcaagtggatatgtggacctctccgaagatgtctttggaaacgggaatatcttcacataaaaactaaacagaagcattctcagaaacttcttggtgatgtttgcattcaaatcccagagttgaaccttcctttgatagttcaggtttgaaacactctttctgtaggatctgcaagtggctatttggaccactctgtggccttcgttcgaaacgggtatatcttcgcataaaatctagacagaagcattctcagaaaatactttgtgatgattgagtttaaatcacagagctgaccattcctttggatggagcaggtttgagacacactttttgtagaatctacaagtggatatttggacctctctgaggatttcgttggaaacgggataactgcacctaactaaacggaagcattctcagaaactgctttgtgatgattgcattcacctcacagagttgaacattcctattgatagagcagtttggaaacactcttgttgtggaatgtgcaagtggagatttggagcgctttgaggcctgtggtagcaaagggaatagcttcatagaaaaactagacagatgcattctcaggaacttctttttggtgatgtttgtattcaactcccagagttgaactttcctttggaaagagcagctatgaaacactctttttctagaatctgcaagtggacgtttggagggctttgtggtttgtggtggaaaaggaaatatcttcacctaaatactagatagaagcattctcagaagcttctctgtgatgactgcattcaactcacggagttgaacactccttttgagagcgcagttttgaaactctctttctgtggcatctgcaaggggacatgtagacctctttgaagatttcgttggaaacggaatcatcttcacataaaaactatacagaagcagtctcagaatcttctttgtgatgtttgcattcaaatcccagagttgaactttcctttcaaagttcacgtttgaaacactctttttgcaggatctacaagtggatatttggaccactctgtgtccttcgttcgaaacgggtatatcttcacacgacatctagacagaagctttctcagaaaattctttgggatgattgagtggaactcacagagctgaacattccttgcgatgtagcagtttagaaacacactttctgcagaatctgcaagtgcatatttggacctctctgaggaattcgttggaaacgggataatttcagctgactaaacagaagcattctcagaaccttcttcgtgatgtctgcattcaactcacagtgtggaacctttctttgatagttcaggtttgaaacactctttttgtagaaactgcaaggggataattgcacttctttgaggcctaccgtagtaaaggaaataacttcctatagaaagaagacagaagcattctcagaaccctcttcgtgatgtttgcattcaactcacagtgctgaacctttctttgatagttcagctttgaaacactcttcttgtagaaactgcaagtggatatttggtcctctctgaggatttcgttggaaacgggataaaccgcacagaactaaacagaagaattctcagagccctcttcgtgatgtttgcattcaactcacagtgctgaacctttctttgatagtgcagctttgaaacactctttttgtagaaactgcaagtggatgtttggtcctctctgaggatttcgttggaaacgggataaaccgcacagaactaaaacagaagcattgtcagaaacttctttgtgatgattgcattcaactcacagagttgaaggttccttttcaaacagcagtttccaatcactctttctgtggaatctgcaagtggatatttgggcctctctgaggatttcgttggaaacgggataaaacgcacagaactaaaacagaagcattctcagaaacttctctgtgatgtttgtgttcaactcccagagtttcacgttgcttttcatagagtagttctgaaacatgcttttcgtagtgtctgcaagtggacatttggagcgctttcaggcctgtggtggaaaacgaattatggtcacataaaaactggagagaagccttctcagaaacttctctgtgatgattgcattcaactcacagagttgaaccctcctatggatagagcagtgttgaaactctctttttgtggaatctgcaagtggatatgtggacctctccgaagatgtctttggaaacgggaatatcttcacataaaaactaaacagaagcattctcagaaacttcttggtgatgtttgcattcaaatcccagagttgaaccttcctttgatagttcaggtttgaaacactctttttgtaggatctgcaagtggctatttggaccactctgtggccttcgttcgaaacgggtatatcttcgcataaaatctagacagaagcattctcagaaaatactttgtgatgattgagtttaaatcacagagctgaccattcctttggatggagcaggtttgagacacactttttgtagaatctacaagtggatatttggacctctctgaggatttcgttggaaacgggataactgcacctaactaaacggaaacattctcagaaactgctttgtgatgattgcattcacctcacagagttgaacattcctattgatagagcagtttggaaacactcttgttgtggaatgtgcaagtggagatttggagcgctttgaggcctatggtagtaaagggaatagcttcatagaaaaactagacagatgcattctcaggaactttttggtgatgtttgtattcaactcccagagttgaactttcctttggaaagagcagctatgaaacactctttttctagaatctgcaagtggacgtttggagggctttgtggtttgtggtggaaaaggaaatatcttcacctaaatactagatagaagcattctcagaagcttctctgtgatgactgcattcaactcacggagttgaacactccttttgagagcgcagttttgaaactctctttctgtggcatctgcaaggggacatgtagacctctttgaagatttcgttggaaacggaatcatcttcacataaaaactatacagaagcagtctcagaatcttctttgtgatgtttgcattcaaatcccagagttgaactttcctttcaaagttcacgtttgaaacactctttttgcaggatctacaagtggatatttggaccactctgtgtccttcgttcgaaacgggtatatcttcacacgacatctagacagaagctttctcagaaaattctttgggatgattgagtggaactcacagagctgaacattccttgcgatgtagcagtttagaaacacactttctgcagaatctgcaagtgcatatttggacctctctgaggaattcgttggaaacgggataatttcagctgactaaacagaagcattctcagaaccttcttcgtgatgtctgcattcaactcacagtgtggaacctttctttgatagttcaggtttgaaacactctttttgtagaaactgcaaggggataattgcacttctttgaggcctaccgtagtaaaggaaataacttcctatagaaagaagacagaagcattctcagaaccctcttcgtgatgtttgcattcaactcacagtgctgaacctttctttgatagttcagctttgaaacactcttcttgtagaaactgcaagtggatatttggtcctctctgaggatttcgttggaaacgggataaaccgcacagaactaaacagaagaattctcagagccctcttcgtgatgtttgcattcaactcacagtgctgaacctttctttgatagtgcagctttgaaacactctttttgtagaaactgcaagtggatgtttggtcctctctgaggatttcgttggaaacgggataaaccgcacagaactaaaacagaagcattgtcagaaacttctttgtgatgattgcattcaactcacagagttgaaggttccttttcaaacagcagtttccaatcactctttctgtggaatctgcaagtggatatttgggcctctctgaggatttcgttggaaacgggataaaacgcacagaactaaaacagaagcattctcagaaacttctctgtgatgtttgtgttcaactcccagagtttcacgttgcttttcatagagtagttctgaaacatgcttttcgtagtgtctgcaagtggacatttggagcgctttcaggcctgtggtggaaaacgaattatggtcacataaaaactggagagaagccttctcagaaacttctctgtgatgattgcattcaactcacaggagttgaaccctcctatggatagagcagtgttgaaactctctttttgtggaatctgcaagtggatatgtggacctctccgaagatgtctttggaaacgggaatatcttcacataaaaactaaacagaagcattctcagaaacttcttggtgatgtttgcattcaaatcccagagttgaaccttcctttgatagttcaggtttgaaacactctttctgtaggatctgcaagtggctatttggaccactctgtggccttcgttcgaaacgggtatatcttcgcataaaatctagacagaagcattctcagaaaatactttgtgatgattgagtttaactcacagagctgaacattcctttggatggagcaggtttgagacacactttttgtagaatctacaagtggatatttggacctctctgaggatttcgttggaaacgggataactgcacctaactaaacggaagcattctcagaaactgctttgtgatgattgcattcacctcacagagttgaacattcctattgatagagcagtttggaaacactcttgttgtggaatgtgcaagtggagatttggagcgctttgaggcctatggtagtaaagggaatagcttcatagaaaaactagacagatgcattctcaggaactttttggtgatgtttgtattcaactcccagagttgaactttcctttggaaagagcagctatgaaacactctttttctagaatctgcaagtggacgtttggagggttttgtggtttgtggtggaaaaggaaatatcttcacctaaatactagatagaagcattctcagaagcttctctgtgatgactgcattcaactcacggagttgaacactccttttgagagcgcagttttgaaactccctttctgtggcatctgcaaggggacatgtagacctctttgaagatttcgttggaaacggaatcatcttcacataaaaactatacagaagcagtctcagaatcttctttgtgatgtttgcattcaaatcccagagttgaactttcctttcaaagttcacgtttgaaacactctttttgcaggatctacaagtggatatttggaccactctgtgtccttcgttcgaaacgggtatatcttcacatgacatctagacagaagctttctcagaaaattctttgggatgattgagtggaactcacagagctgaacattccttgcgatgtagcagtttagaaacacactttctgcagaatctgcaagtgcatatttggacctctgtgaggaattcgttggaaacgggataatttcagctgactaaacagaagcattctcagaaccttcttcgtgatgtctgcattcaactcacagtgtggaacctttctttgatagttcaggtttgaaacactctttttgtagaaactgcaaggggataattgcacttctttgaggcctaccgtagtaaaggaaataacttcctatagaaagaagacagaagcattctcagaaccctcttcgtgatgtttgcattcaactcacagtgctgaacctttctttgatagttcagctttgaaacactcttcttgtagaaactgcaagtggatatttggtcctctctgaggatttcgttggaaacgggataaaccgcacagaactaaacagaagcattctcagaacctacttcgtgatgtttgcattcaactcacagtgttgaacctttctttgatagttcaggtttgaaacggtctttctgtagaaactgcaagtagatatttggacctctctgaggatttcgttggaaacgggataaaccgcacagaactaaaacagaagcattcacagaaaactcttggtgacgactgagtttaactcacagagctgaacattcctttggatggagcagtttcgaaacacactatttgtagaatgtgcaagtggatatttgggcctctctgaggatttcgttggaaacgggataaaccgcacagaactaaacagaagcattctcagaaactactttgtgatgattgcattcaagtcacagagttgaacattccctttgacagagcagtttggaaactctctttgtgtagaatctgcaagtggagatatggaccgctttgaggcctatggtagtaaaggaaatagcttcatataaaagctagacagtagcattctcagaaacttctttgtgatgcttgcattcaactcacagagttgaactttcctttcgagagagaagctttgaaacactctttttccagaatctgcaagtggacatttggagggctttgaggcctgtggtggaaaaggaattaacttcccgtaaaagctagatagaagcattgtcagaaacttctttgtgatgattgcattcaactcacagagatgaagattcctttacaaacagcagtttccaaacactctttctgtggaatctgcaagtggatatttggacctctttgaagatttcgttggaaacgggagaatcttcacagaaaagctaaacagaagcattctcagaaacttctctgtgatgtttgtgttcaactcccagagtttcacattgcttttcatagagtagttctgaaacatgcttttcgtagtgtctgcaagtggacatttggagcgctttcaggcctgtggtggaaaacgaattatggtcccataaaaactggagagaagccttctcagaaacttctctgtgatgattgcattcaactcacagatttgaaccctcctatggatagagcattcttgaaactctctttttgtggaatctgcaagtggatatgtggacctctccgaagatgtctttggaaacgggaatatcttcacataaaaactaaacagaagcattctcagaaacttcttggtgatgtttgcattcaaatcccagtagttgaaccttcctgtgatagttcaggtttgaaacactctttttgtaggatctgcaagtggatatttggaccactctgtggccttcgttcgaaacgggtacatcttcacataaaatctagacagaagcattctcagaaaatactttgtgatgattgagtttaaatcacagagctgaccattcctttggatggagcaggtttgagacacactttttgtagaatctacaagtggatatttggacctctctgaggatttcgttggaaacgggataactgcacctaactaaacggaagcattctcagaaactgctttgtgatgattgcattcacctcacagagttgaacattcctattgatagagcagtttggaaacactcttgttgtggaatgtgcaagtggagatttggagcgctttgaggcctatggtagtaaagggaatagcttcatagaaaaactagacagatgcattctcaggaactttttggtgatgtttgtattcaactcccagagttgaactttcctttggaaagagcagctatgaaacactctttttctagaatctgcaagtggacgtttggagggctttgtggtttgtggtggaaaaggaaatatcttcacctaaatactagatagaagcattctcagaagcttctctgtgatgactgcattcaactcacggagttgaacactccttttgagagcgcagttttgaaactctctttctgtggcatctgcaaggggacatgtagacctctttgaagatttcgttggaaacggaatcatcttcacataaaaactatacagaagcagtctcagaatcttctttgtgatgtttgcattcaaatcccagagttgaactttcctttcaaagttcacgtttgaaacactctttttgcaggatctacaagtggatatttggaccactctgtgtccttcgttcgaaacgggtatatcttcacacgacatctagacagaagctttctcagaaaattctttgggatgattgagtggaactcacagagctgaacattccttgcgatgtagcagtttagaaacacactttctgcagaatctgcaagtgcatatttggacctctctgaggaattcgttggaaacgggataatttcagctgactaaacagaagcattctcagaaccttcttcgtgatgtctgcattcaactcacagtgtggaacctttctttgatagttcaggtttgaaacactctttttgtagaaactgcaaggggataattgcacttctttgaggcctaccgtagtaaaggaaataacttcctatagaaagaagacagaagcattctcagaaccctcttcgtgatgtttgcattcaactcacagtgctgaacctttctttgatagttcagctttgaaacactcttcttgtagaaactgcaagtggatatttggtcctctctgaggatttcgttggaaacgggataaaccgcacagaactaaacagaagaattctcagagccctcttcgtgatgtttgcattcaactcacagtgctgaacctttctttgatagtgcagctttgaaacactctttttgtagaaactgcaagtggatgtttggtcctctctgaggatttcgttggaaacgggataaaccgcacagaactaaaacagaagcattgtcagaaacttctttgtgatgattgcattcaactcacagagttgaaggttccttttcaaacagcagtttccaatcactctttctgtggaatctgcaagtggatatttgggcctctctgaggatttcgttggaaacgggataaaacgcacagaactaaaacagaagcattctcagaaacttctctgtgatgtttgtgttcaactcccagagtttcacgttgcttttcatagagtagttctgaaacatgcttttcgtagtgtctgcaagtggacatttggagcgctttcaggcctgtggtggaaaacgaattatggtcacataaaaactggagagaagccttctcagaaacttctctgtgatgattgcattcaactcacagagttgaaccctcctatggatagagcagtgttgaaactctctttttgtggaatctgcaagtggatatgtggacctctccgaagatgtctttggaaacgggaatatcttcacataaaaactaaacagaagcattctcagaaacttcttggtgatgtttgcattcaaatcccagagttgaaccttcctttgatagttcaggtttgaaacactctttctgtaggatctgcaagtggctatttggaccactctgtggccttcgttcgaaacgggtatatcttcgcataaaatctagacagaagcattctcagaaaatactttgtgatgattgagtttaaatcacagagctgaccattcctttggatggagcaggtttgagacacactttttgtagaatctacaagtggatatttggacctctctgaggatttcgttggaaacgggataactgcacctaactaaacggaagcattctcagaaactgctttgtgatgattgcattcacctcacagagttgaacattcctattgatagagcagtttggaaacactcttgttgtggaatgtgcaagtggagatttggagcgctttgaggcctgtggtagtaaagggaatagcttcatagaaaaactagacagatgcattctcaggaactttttggtgatgtttgtattcaactcccagagttgaactttcctttggaaagagcagctatgaaacactctttttctagaatctgcaagtggacgtttggagggctttgtggtttgtggtggaaaaggaaatatcttcacctaaatactagatagaagcattctcagaagcttctctgtgatgactgcattcaactcacggagttgaacactccttttgagagcgcagttttgaaactctctttctgtggcatccgcaaggggacatgtggacctctttgaagatttcgttggaaacggaatcatcttcacataaaaactatacagaagcagtctcagaatcttctttgtgatgtttgcattcaaatcccagagttgaactttcctttcaaagttcacgtttgaaacactctttttgcaggatctacaagtggatatttggaccactctgtgtcctccgttcgaaacgggtatatcttcacatgacatctagacagaagctttctcagaaaattctttgggatgattgagtggaactcacagagctgaacattccttgcgatgtagcagtttagaaacacactttctgcagaatctgcaagtgcatatttggacctctctgaggaattcgttggaaacgggataatttcagctgactaaacagaagcattctcagaaccttcttcgtgatgtctgcattcaactcacagtgtggaacctttctttgatagttcaggtttgaaacactctttttgtagaaactgcaaggggataattgcacttctttgaggcctaccgtagtaaaggaaataacttcctatagaaagaagacagaagcattctcagaaccctcttcgtgatgtttgcattcaactcacagtgctgaacctttctttgatagttcagctttgaaacactcttcttgtagaaactgcaagtggatatttggtcctctctgaggatttcgttggaaacgggataaaccgcacagaactaaacagaagaattctcagagccctcttcgtgatgtttgcattcaactcacagtgctgaacctttctttgatagtgcagctttgaaacactctttttgtagaaactgcaagtggatgtttggtcctctctgaggattttgttggaaacgggataaaccgcacagaactaaaacagaagcattgtcagaaacttctttgtgatgattgcattcaactcacagagttgaaggttccttttcaaacagcagtttccaatcactctttctgtggaatctgcaagtggatatttgggcctctctgaggatttcgttggaaacgggataaaacgcacagaactaaaacagaagcattctcagaaacttctttgtgatgtttgtgttcaactcccagagtttcacgttgcttttcatagagtagttctgaaacatgcttttcgtagtgtctgcaagtggacatttggagcgctttcaggcctgtggtggaaaacgaattatggtcacataaaaactggagagaagccttctcagaaacttctctgtgatgattgcattcaactcacagagttgaaccctcctatggatagagcagtgttgaaactctctttttgtggaatctgcaagtggatatgtggacctctccgaagatgtctttggaaacgggaatatcttcacataaaaactaaacagaagcattctcagaaacttcttggtgatgtttgcattcaaatcccagagttgaaccttcctttgatagttcaggtttgaaacactctttctgtaggatctgcaagtggctatttggaccactctgtggcccttcgttcgaaacgggtatatcttcgcataaaatctagacagaagcattctcagaaaatactttgtgatgattgagtttaaatcacagagctgaccattcctttggatggagcaggtttgagacacactttttgtagaatctacaagtggatatttggacctctctgaggatttcgttggaaacgggataactgcacctaactaaacggaagcattctcagaaactgctttgtgatgattgcattcacctcacagagttgaacattcctattgatagagcagtttggaaacactcttgttgcggaatgtgcaagtggagatttggagcgctttgaggcctgtggtagtaaagggaatagcttcatagaaaaactagacagatgcattctcaggaactttttggtgatgtttgtattcaactcccagagttgaactttcctttggaaagagcagctatgaaacactctttttctagaatctgcaagtggacgtttggagggctttgtggtttgtggtggaaaaggaaatatcttcacctaaatactagatagaaagcattctcagtaagcttctctgtgatgactgcattcaactcacggagttgaacactccttttgagagcgcagttttgaaactctctttctgtggcatctgcaaggggacatgtagacctctttgaagatttcgttggaaacggaatcatcttcacataaaaactatacagaagcagtctcagaatcttctttgtgatgtttgcattcaaatcccagagttgaacttccctttcaaagttcacgtttgaaacactctttttgcaggatgtacaagtggatatttggagcactctgtgtccttcgttcgaaacgggtatatcttcacatgacatctagacagaagctttctcagaaaattctttgggatgattgagtggaactcacagagctgaacattccttgcgatgtagcagtttagaaacacactttctgcagaatctgcaagtgcatatttggacctctctgaggaattcgttggaaacgggataatttcagctgactaaacagaagcattctcagaaccttcttcgtgatgtctgcattcaactcacagtgtggaacctttctttgatagttcaggtttgaaacactctttttgtagaaactgcaaggggataattgcacttctttgaggcctaccgtagtaaaggaaataacttccctatagaaagaagacagaagcattctcagaaccctcttcgtgatgtttgcattcaactcacagtgctgaacctttctttgatagttcagctttgaaacactcttcttgtagaaactgcaagtggatatttggtcctctctgaggatttcgttggaaacgggataaaccgcacagaactaaacagaagcattctcagagccctcttcgtgatgtttgtattcaactcacagtgctgaacctttctttgatagtgcagctttgaaacactctttttgtagaaactgcaagtggatgttttgtcctccctgaggatttcgttggaaacgggataaaccgcacagaactaaaacagaagcattcacagaaaactcttggtgacgactgagtttaactcacagagctgaacattcctttggatggagcagtttcgaaacacactatttgtagaatctgcaagtggatatttgggcctctctgaggatttcgttggaaacgggataaaccgcacagaactaaaacagaagcattctcagaaactactttgtgatgattgcattcaagtcacagagttgaacattccctttgacagagcagtttggaaactctctttgtgtagaatctgcaagtggagatatggaccgctttgaggcctatggtagtaaaggaaatagcttcatataaaagctagacagtagcattctcagaaacttctttgtgatgcttgcattcaactcacagagttgaactttcctttcgagagagaagctttgaaatactctttttccagaatctgcaagtggacatttggagggctttgaggcctgtggtggaaaaggaattatcttcccgtaaaagctagatggaagcattgtcagaaacttctttgtgatgattgcattcaactcacagagttgaaggttccttttcaaacagcagtttccaatcactctttctgtggaatctgcaagtggatatttggacctattttgaagatttcgttggaaacgggataatcttcacagaaaagctaaacagaagcattctcagaaacttctctgtgatgtttgtgttcaactcccagagtttcacgttgcttttcatagagtagttctgaaacatgcttttcgtagtgtctgcaagtggacatttggagcgctttcaggcctgtggtggaaaacgaattatggtcacataaaaactggagagaagccttctcagaaacttctctgtgatgattgcattcaactcacagagttgaaccctcctatggatagagcagtgttgaaactctctttttgtggaatctgcaagtggatatgtggacctctccgaagatgtctttggaaacgggaatatcttcacataaaaactaaacagaagcattctcagaaacttcttggtgatgtttgcattcaaatcccagagttgaaccttcctttgatagttcaggtttgaaacactctttctgtaggatctgcaagtggctatttggaccactctgtggccttcgttcgaaacgggtatatcttcgcataaaatctagacagaagcattctcagaaaatactttgtgatgattgagtttaaatcacagagctgaccattcctttggatggagcaggtttgagacacactttttgtagaatctacaagtggatatttggacctctctgaggatttcgttggaaacgggataactgcacctaactaaacggaagcattctcagaaactgctttgtgatgattgcattcacctcacagagttgaacattcctattgatagagcagtttggaaacactcttgttgtggaatgtgcaagtggagatttggagcgctttgaggcctgtggtagtaaagggaatagcttcatagaaaaactagacagatgcattctcaggaaccttttggtgatgtttgtattcaactcccagagttgaactttcctttggaaagagcagctatgaaacactctttttctagaatctgcaagtggacgtttggagggctttgtggtttgtggtggaaaaggaaatatcttcacctaaatactagacagaagcattctcagaagcttctctgtgatgactgcattcaactcacggagttgaacactccttttgagagcgcagttttgaaactctctttctgtggcatctgcaaggggacatgtagacctctttgaagatttcgttggaaacggaatcatcttcacataaaaactatacagaagcagtctcagaatcttctttgtgatgtttgcattcaaatcccagagttgaactttcctttcaaagttcacgtttgaaacactctttttgcaggatctacaagtggatatttggaccactctgtgtccttcgttcgaaacgggtatatcttcacacgacatctagacagaagctttctcagaaaattctttgggatgattgagtggaactcacagagctgaacattccttgcgatgtagcagtttagaaacacactttctgcagaatctgcaagtgcatatttggacctctctgaggaattcgttggaaacgggataatttcagctgactaaacagaagcattctcagaaccttcttcgtgatgtctgcattcaactcacagtgtggaacctttctttgatagttcaggtttgaaacactctttttgtagaaactgcaaggggataattgcacttctttgaggcctaccgtagtaaaggaaataacttcctatagaaagaagacagaagcattctcagaaccctcttcgtgatgtttgcattcaactcacagtgctgaacctttctttgatagttcagctttgaaacactcttcttgtagaaactgcaagtggatatttggtcctctctgaggatttcgttggaaacgggataaaccgcacagaactaaacagaagaattctcagagccctcttcgtgatgtttgcattcaactcacagtgctgaacctttctttgatagtgcagctttgaaacactctttttgtagaaactgcaagtggatgtttggtcctctctgaggatttcgttggaaacgggataaaccgcacagaactaaaacagaagcattgtcagaaacttctttgtgatgattgcattcaactcacagagttgaaggttccttttcaaacagcagtttccaatcactctttctgtggaatctgcaagtggatatttgggcctctctgaggatttcgttggaaacgggataaaacgcacagaactaaaacagaagcattctcagaaacttctctgtgatgtttgtgttcaactcccagagtttcacgttgcttttcatagagtagttctgaaacatgcttttcgtagtgtctgcaagtggacatttggagcgctttcaggcctgtggtggaaaacgaattatggtcacataaaaactggagagaagccttctcagaaacttctctgtgatgattgcattcaactcacagagttgaaccctcctatggatagagcagtgttgaaactctctttttgtggaatctgcaagtggatatgtggacctctccgaagatgtctttggaaacgggaatatcttcacataaaaactaaacagaagcattctcagaaacttcttggtgatgtttgcattcaaatcccagagttgaaccttcctttgatagttcaggtttgaaacactctttctgtaggatctgcaagtggctatttggaccactctgtggccttcgttcgaaacgggtatatcttcgcataaaatctagacagaagcattctcagaaaatactttgtgatgattgagtttaaatcacagagctgaccattcctttggatggagcaggtttgagacacactttttgtagaatctacaagtggatatttggacctctctgaggatttcgttggaaacgggataactgcacctaactaaacggaagcattctcagaaactgctttgtgatgattgcattcacctcacagagttgaacattcctattgatagagcagtttggaaacactcttgttgtggaatgtgcaagtggagatttggagcgctttgaggcctatggtagtaaagggaatagcttcatagaaaaactagacagatgcattctcaggaactttttggtgatgtttgtattcaactcccagagttgaactttcctttggaaagagcagctatgaaacactctttttctagaatctgcaagtggacgtttggagggctttgtggtttgtggtggaaaaggaaatatcttcacctaaatactagatagaagcattctcagaagcttctctgtgatgactgcattcaactcacggagttgaacactccttttgagagcgcagttttgaaactctctttctgtggcatctgcaaggggacatgtagacctctttgaagatttcgttggaaacggaatcatcttcacataaaaactatacagaagcagtctcagaatcttctttgtgatgtttgcattcaaatcccagagttgaactttcctttcaaagttcacgtttgaaacactctttttgcaggatctacaagtggatatttggaccactactgtgtccttcgttcgaaacgggtatatcttcacatgacatctagacagaagctttctcagaaaattctttgggatgattgagtggaactcacagagctgaacattccttgcgatgtagcagtttagaaacacactttctgcagaatctgcaagtgcatatttggacctctctgaggaattcgttggaaacgggataatttcagctgactaaacagaagcattctcagaaccttcttcgtgatgtctgcattcaactcacagtgtggaacctttctttgatagttcaggtttgaaacactctttttgtagaaactgcaaggggataattgcacttctttgaggcctaccgtagtaaaggaaataacttcctatagaaagaagacagaagcattctcagaaccctcttcgtgatgtttgcattcaactcacagtgctgaacctttctttgatagttcagctttgaaacactcttcttgtagaaactgcaagtggatatttggtcctctctgaggatttcgttggaaacgggataaaccgcacagaactaaacagaagaattctcagagccctcttcgtgatgtttgcattcaactcacagtgctgaacttttctttgatagtgcagctttgaaacactctttttgtagaaactgcaagtggatgtttggtcctctctgaggatttcgttggaaacgggataaaccgcacagaactaaaacagaagcattctcagaaccttcttcgtgatgtttgcattcaactcacagtgttgaacctttctttgatagttcaggtttgaaacggtctttctgtagaaactgcaagtagatatttggacctctctgaggatttcgttggaaacgggataacccgcacagaactaaaacagaagcattcacagaaaactcttggtgacgactgagtttaactcacagagctgaacattcctttggatggagcagtttcgaaacacactatttgtagaatgtgcaagtggatatttaggcctctctgaggatttcgttggaaacggggtaaaccgcacagaactaaacagaagcattctcagaaactactttgtgatgattgcattcaagtcacagagttgaacattccctttgacagagcagtttggaaactctctttgtgtagaatctgcaagtggagatatggaccgctttgaggcctatggtagtaaaggaaatagcttcatataaaagctagacagtagcattctcagaaacttctttgtgatgcttgcattcaactcacagagttgaactttcctttcgagagagaagctttgaaacactctttttccagaatctgcaagtggacatttggagggctttgaggcctgtggtggaaaaggaattatcttcccgtaaaagctagatagaagcattgtcagaaacttctttgtgatgattgcattcaactcacagagttgaaggttccttttcaaagagcagtttccaatcactctttctgtggaatctgcaagtggatattcggacctattttgaagattttgttggaaacgggagaatcttcacaggaaagctaaacagaagcattctcagaaacttctctgtgatgtttgtgttcaactcccagagtttcacattgcttttcatagagtagttctgaaacatgcttttcgtagtgtctacaagtggacatttggagcgctttcaggcctgtggtggaaaacgaattatggtcacataaaaactggagagaagccttctcagaaacttctctgtgatgattgcattcaactcacagagttgaaccctcctatggatagagcagtgttgaaactctctttttgtggaatctgcaagtggatacgtggacctctccgaagatgtctttggaaacgggaatatcttcacataaaaactaaacagaagcattctcagaaacttcttggtgatgtttgcattcaaatcccagagttgaaccttcctttgatagttcaggtttgaaacactctttttgtaggatctgcaagtggatatttggaccactctgtggccttcgttcgaaacgggtatatcttcgcataaaatctagacagaagcattctcagaaaatactttgtgatgattgagtttaaatcacagagctgaacattcctttggatggagcaggtttgagacacactttttgtagaatctacaagtggatatttggacctctctgaggatttcgttggaaacgggataactgcacctaactaaacggaagcattctcagaaactgctttgtgatgattgcattcacctcaccagagttgaacattcctattgatagagcagtttggaaacactcttgttgtggaatgtgcaagtggagatttggagcgctttgaggcctatggtagtaaagggaatagcttcatagaaaaactagacagatgcattctcaggaactttttggtgatgtttgtattcaactcccagagttgaactttccctttggaaagagcagctatgaaacactctttttctagaatctgcaagtggacgtttggagggctttgtggtttgtggtggaaaaggaaatatcttcacctaaatactagatagaagcattctcagaagcttctctgtgatgactgcattcaactcacggagttgaacactccttttgagagcgcagttttgaaactctctttctgtggcatctgcaaggggacatgtagacctctttgaagatttcgttggaaacggaatcatcttcacataaaaactatacagaagcagtctcagaatcttctttgtgatgtttgcattcaaatcccagagttgaactttcctttcaaagttcacgtttgaaacactctttttgcaggatctacaagtggatatttggaccactctgtgtccttcgttcgaaacgggtatatcttcacacgacatctagacagaagctttctcagaaaattctttgggatgattgagtggaactcacagagctgaacattccttgcgatgtagcagtttagaaacacactttctgcagaatctgcaagtgcatatttggacctctctgaggaattcgttggaaacgggataatttcagctgactaaacagaagcattctcagaaccttcttcgtgatgtctgcattcaactcacagtgtggaacctttctttgatagttcaggtttgaaacactctttttgtagaaactgcaaggggataattgcacttctttgaggcctaccgtagtaaaggaaataacttcctatagaaagaagacagaagcattctcagaaccctcttcgtgatgtttgcattcaactcacagtgctgaacctttctttgatagttcagctttgaaacactcttcttgtagaaactgcaagtggatatttggtcctctctgaggatttcgttggaaacgggataaaccgcacagaactaaacagaagaattctcagagccctcttcgtgatgtttgcattcaactcacagtgctgaacctttctttgatagtgcagctttgaaacactctttttgtagaaactgcaagtggatgtttggtcctctctgaggatttcgttggaaacgggataaaccgcacagaactaaaacagaagcattgtcagaaacttctttgtgatgattgcattcaactcacagagttgaaggttccttttcaaacagcagtttccaatcactctttctgtggaatctgcaagtggatatttgggcctctctgaggatttcgttggaaacgggataaaacgcacagaactaaaacagaagcattctcagaaacttctctgtgatgtttgtgttcaactcccagagtttcacgttgcttttcatagagtagttctgaaacatgcttttcgtagtgtctgcaagtggacatttggagcgctttcaggcctgtggtggaaaacgaattatggtcacataaaaactggagagaagccttctcagaaacttctctgtgatgattgcattcaactcacagagttgaaccctcctatggatagagcagtgttgaaactctctttttgtggaatctgcaagtggatatgtggacctctccgaagatgtctttggaaacgggaatatcttcacataaaaactaaacagaagcattctcagaaacttcttggtgatgtttgcattcaaatcccagagttgaaccttcctttgatagttcaggtttgaaacactctttctgtaggatctgcaagtggctatttggaccactctgtggccttcgttcgaaacgggtatatcttcgcataaaatctagacagaagcattctcagaaaatactttgtgatgattgagtttaaatcacagagctgaccattcctttggatggagcaggtttgagacacactttttgtagaatctacaagtggatatttggacctactcctgaggatttcgttggaaacgggataactgcacctaactaaacggaagcattctcagaaactgctttgtgatgattgcattcacctcacagagttgaatattcctattgatagagcagtttggaaaaactcttgttgtggaatgtgcaagtggagatttgaagcgctttgaggcctatggtagtaaagggaatagcttcatagaaaaactagacagatgcattctcaggaactttttggtgatgtttgtattcaactcccagagttgaactttcctttggaaagagcagctatgaaacactctttttctagaatctgcaagtggacgttggagggctttgtggtttgtggtggaaaaggaaatatcttcacctaaatactagatagaagcattctcagaagcttctctgtgatgactgcattcgactcacggagttgaacactccttttgagagcgcagttttgaaactctctttctgtggcatctgcaaggggacatgtagacctctttgaagatttcgttggaaacggaatcatcttcacatcaaaactatacagaagcagtctcagaatcttctttgtgatgtttcgcattcaaatcccagagttgaactttcctttccaagttcacgtttgaaacactctttttgcaggatctacaagtggatatttggaccactctgtgtccttcgttcgaaacgggtatatcttcacatgacatctagacagaagctttctcagaaaattctttgggatgattgagtggaactcacagaagctgaacattccttgcgatgtagcagtttagaaacacactttctgcagaatctgcaagtgcatatgtggacctctctgaggaattcgttggaaacgggataatttcagctgactaaacagaagcattctcagaaccatcttcgtgatgtctgcattcaactcacagtgtggaacctttctttgatagttcaggtttgaaacactctttttgtagaaactgcaaggggatcattgcacttctttgaggcctaccgtagtaaagtagataacttcctacaaaaagaagacagaagcattctcagaaaattctttgtgatgactgagtttaactcacagggctgaacattcctttggatggagcagtttcgaatcacactctttgtagaacctgcaagtggatatttggtcctctctgaggatttcgttggaaaccggatataccgcacagaactaaacagaagcattctcagaaactactttgtgatgattgcattcaagtcacagagttgaacattccctttgacagagcagtttggaaactctctttgtgtagaatctgcaagtggagatatggaccgctttgaggcctatggtagtaaaggaaatagcttcatataaaagctagacagtagcattctcagaaacttctttgtgatgcttgcattcaactcacagagttgaactttcctttcgagagagaagctttgaaacactctttttccagaatgtgcaagtggacatttggggagctttgaggcctgtggtggaaaaggaattatcttcccgtaaaagctagatagaagcattgtcagaaacttctttgagatgattgcattcaactcacagagttgaaggttccttttcaaacagcagtttccaatcactctttctgtggaatctgcaagtggatatttcgacctctttgaagatttcgttggaaacgggagaatcttcacagaaaagctaaacagaagcattctcagaaacttctctgtgatgtttgtgttcaactcccagagtttcacgttgcttttcatagagtagttctgaaacatgcttttcgtagtgtctgcaagtggacatttggagcgctttcaggcctgtggtggaaaacgaattatggtcacataaaaactggagagaagccttctcagaaacttctctgtgatgattgcattcaactcacagagttgaaccctcctatggatagagcagtgttgaaactctctttttgtggaatctgcaagtggatatgtggacctctccgaagatgtctttggaaacgggaatatcttcacataaaaactaaacagaagcattctcagaaacttcttggtgatgtttgcattcaaatcccagagttgaaccttcctttgatagttcaggtttgaaacactctttctgtaggatctgcaagtggctatttggaccactctgtggccttcgttcgaaacgggtatatcttcgcataaaatctagacagaagcattctcagaaaatactttgtgatgattgagtttaaatcacagagctgaccattcctttggatggagcaggtttgagacacactttttgtagaatctacaagtggatatttggacctctctgaggatttcgttggaaacgggataactgcacctaactaaacggaagcattctcagaaactgctttgtgatgattgcattcacctcacagagttgaacattcctattgatagagcagtttggaaacactcttgttgtggaatgtgcaagtggagatttggagcgctttgaggcctgtggtagcaaagggaatagcttcatagaaaaactagacagatgcattctcaggaactttttggtgatgtttgtattcaactcccagagttgaactttcctttgtaaagagcagctatgaaacacactttttctagaatctgcaagtggacgtttggagggctttgtggtttgtggtggaaaaggaaatatcttcacctaaatactagacagaagcattctcagaagcttctctgtgatgactgcattcaactcacggagttgaacactccttttgagagcgcagttttgaaactctctttctgtggcatctgcaaggggacatgtagacctctttgaagatttcgttggaaacggaatcatcttcacataaaaactatacagaagcagtctcagaatcttctttgtgatgtttgcattcaaatccccgagttgaactttcctttcaaagttcacgtttgaaacactctttttgcaggatctacaagtggatatttggaccactctgtgtccttcgttcgaaacgggtatatcttcacatgacatctagacagaagctttctcagaaaattctttgggatgattgagttgaactcacagagctgagcattccttgcgatgtagcagtttagaaacacactttctgcagaatctgcaagtgcatatttggacctctctgaggaattcgttggaaacgggataatttcagctgactaaacagaagcattctcagaaccttcttcgtgatgtctgcattcaactcacagtgtggaacctttctttgatagttcaggtttgaaacactcttttcgtagaaactgcaaggggatcattgcactctttgaggagtaccgtagtaaaggaaataacttcctataaaaagaagacagaagcattctcagaaccctcttcgtgatgtttgcattcaactcacagtgctgaacctttctttgatagttcagctttgaaacactctttttgtagaaactgcaagtggatatttggtcctctctgaggatttcgttggaaacgggataaactgcccagaactaaacagaagcattctcagaaccttcttcgtgatgtttgcattcaactcaacagtgttgaacctttctttgatagttcaggtttgaaacggtctttctgtagaaactgcaagtagatatttggaccgctctgaggatttcgttggaaacgggataacccgcacagaactaaaacagatagcattcacagaaaactcttggtgacgactgagtttaactcacagagctgaacatccctttggatggagcagtttcgaaacacactatttgtagaatgtgcaagtggatatttgggcctctctgaggatttcgttggaaacgggataaaccgcacagaactaaacagagcattctcagaaactactttgtgatgattgcattcaagtcacagagttgaacattccctttgacagagcagtttggaaactctctttgtgtagaatctgcaagtggagatatggaccgctttgaggcctatggtagtaaggaaatagcttcatataaaagctagacagtagcattctcagaaacttctttgtgatgcttgcattcaactcacagagttgaactttcctttcgagagagaagctttgaaacactctttttccagaatgtgcaagtggacatttggggagctttgaggcctgtggtggaaaaggaattatcttcccgtaaaagctagatagaagcattgtcagaaacttctttgtgatgattgcattcaactcacagagttgaaggttccttttcaaacagcagtttccaatcactctttctgtggaatctgcaagtggatattttgacctctttgaagatttcattggaaacgggagaatcttcacagaaaagctaaacagaagcattctcagaaacttctctgtgatgtttgtgttcaactcccagagtttcacgttgcttttcatagagtagttctgaaacatgcttttcgtagtgtctgcaagtggacatttggagcgctttcaggcctgtggtggaaaacgaattatggtcacataaaaactggagagaagccttctcagaaacttctctgtgatgattgcattcaactcacagagttgaaccctcctatggatagagcagtgttgaaactctctttttgtggaatctgcaagtggatatgtggatctctccgaagatgtctttggaaacgggaatatcttcacataaaaactaaacagaagcattctcagaaacttcttggtgatgtttgcattcaaatcccagagttgaaccttcatttgatagttcaggtttgaaacactctttttgtaggatctgcaagtggctatttggaccactctgtggcctttgttcgaaacgggtatatcttcgcataaaatctagacagaagcattctcagaaaatactttgtgatgattgagtttaaatcacagagctgaacattcctttggatggagcaggtttgagacacactttttgtagaatctacaagtggatatttggacctctctgaggatttcgttggaaacgggataactgcacctaagctaaacggaagcattctcagaaactgctttgtgatgattgcattcacctcacagagttgaacattcctattgatagagcagtttggaaacactcttgttgtggaatgtgcaagtggagatttggagcgctttgaggcctatggtagtaaagggaatagcttcatagaaaactagacagatgcattctcaggaactttttggtgatgtttgtattcaactcccagagttgaactttcctttggaaagagcagctatgaaacactctttttctagaatctgcaagtggacgtttggagggctttgtggtttgtggtggaaaaggaaatatcttcacctaaatactagatagaagcattctcagaagcttctctgtgatgactgcattcaactcacggagttgaacactccttttgagagcgcagttttgaaactctctttctgtggcatctgcaaggggacatgtagacctctttgaagatttcgttggaaacggaatcatcttcacataaaaactatacagaagcagtctcagaatcttctttgtgatgtttgcattcaaatcccagagttgaactttactttcaaagttcacgtttgaaacactctttttgcaggatctacaagtggatatttggaccactctgtgtccttcgttcgaaacgggtatatcttcacacgacatctagacagaagctttctcagaaaattctttgggatgattgagtggaactcacagagctgaacattccttgcgatggagcagtttagaaacacactttctgcagaatctgcaagtgcatatttggacctctctgaggaattcgttggaaacgggataatttcagctgactaaacagaagcattctcagaaccttcttcgtgatgtctgcattcaactcacagtgtggaacctttctttgatagttcaggtttgaaacactctttttgtagaaactgcaaggggataattgcacttctttgaggcctaccgtagtaaaggaaataacttcctatagaaagaagacagaagcattctcagaaccctcttcgtgatgtttgcattcaactcacagtgctgaacctttctttgatagttcagctttgaaacactcttcttgtagaaactgcaagtggatatttggtcctctctgaggatttcgttggaaacgggataaaccgcacagaactaaacagaagcattctcagaaccttcttcgtgatgtttgcattcaactcacagtgttgaacctttctttgatagttcaggtttgaaacggtctttctgtagaaactgcaagtagatatttggacctctctgaggatttcgttggaaacgggataaaccccacagaactaaaacagaagaattctcagaaccctcttcgtgatgtttgcattcaactcacagtgctgaacctttctttgatagttcagctttgaaacactctttttgtagaaactgcaagtggatatttggtcctctctgaggatttcgttggaaacgggataaaacgcacagaactaaacagaagcattctcagaaccttcttcgtgatgtttgcattcaactcacagtgttgaacctttctttgatagttcaggtttgaaacggtctttctgtagaaactgcaagtagatatttggacctctctgaggatttcgttggaaacgggataacccgcacagaactaaaacagaagcattcacagaaaactcttggtgacgactgagtttaacccacagagctgaacattcctttggatggagcagtttcgaaacacactatttgtagaatgtgcaagtggatatttgggcctctctgaggattttgttggaaacgggataaactgcccagaactaaacagaagcattctcagaaactactttgtgatgattgcattcaagtcacagagttgaacattccctttgacagagcagtttggaaactctctttgtgtagaatctgcaagtggagatatggaccgctttgaagcctatggtagtaaaggaaatagcttcatataaaagctagacagtagcattctcagaaacttctttgtgatgcttgcattcaactcacagagttgaactttcctttcgagagagaagctttgaaacactctttttccagaatctgcaagtggacatttggagggctttgaggcctgtggtggaaaaggaattatcttcccgtaaaagctagatagaagcattgtcagaaacttctttgtgatgattgcattcaactcacagagttgaaggttccttttcaaagagcagtttccaatcactctttctgtggaatctgcaagtggatatttggacctattttgaagatttcgttggaaacgggagaatcttcacaggaaagctaaacagaagcattctcagaaacttctctgtgatgtttgtgttcaactcccagagtttcacattgcttttcatagagtagttctgaaacatgcttttcgtagtgtctacaagtggacatttggagcgctttcaggcctgtggtggaaaacgaattatggtcacataaaaactggagagaagccttctcagaaacttctctgtgatgattgcattcaactcacagagttgaaccctcctatggatagagcagtgttgaaactctctttttgtggaatctgcaagtggatatgtggacctctccgaagatgtctttggaaacgggaatatcttcacataaaaactaaacagaagcattctcagaaacttcttggtgatgtttgcattcaaatcccagagttgaaccttcctttgatagttcaggtttgaaacactctttttgtaggatctgcaagtggatatttggaccactctgtggccttcgttcgaaacgggtatatcttcgcataaaatctagacagaagcattctcagaaaatactttgtgatgattgagttgaactcacagagctgaacattcctttggatggagcaggtttgagacacactttttgtagaatctacaagaggatatttggacctctctgaggatttcgttggaaacgggataactgcacctaactaaacggaagcattcccagaaactgctttgtgatgattgcattcacctcacagagttgaacattcctattgatagagcagtttggaaacactcttgttgtggaatgtgcaagtggagatttggagtgctttgaggcctatggtagtaaagggaatagcttcatagaaaaactagacagatgcattctcaggaactttttggtgatgtttgtattcaactcccagagttgaactttccctttggaaagagcagctatgaaacactctttttctagaatctgcaagtggacgtttggagggctttgtggtttgtggtggaaaaggaaatatcttcacctaaatactagatagaagcatcctcagaagcttctctgtgatgactgcattcaactcacggagttgaacactccttttgagagcgcagttttgaaactctctttctgtggcatctgcaaggggacatgtagacctctttgaagatttcgttggaaacggaatcatcttcacataaaaactatacagaagcagtctcagaatcttctttgtgatgtttgcattcaaatccccgagttgaactttcctttcaaagttcacgtttgaaacactctttttgcaggatctacaagtggatatttggaccactctgtgtccttcgttcgaaacgggtatatcttcacatgacatctagacagaagctttctcagaaaattctttgggatgattgagtggaactcacagagctgaacattccttgcgatgtagcagtttagaaacacactttctgcagaatctgcaagtgcatatttggacctctctgaggaattcgttggaaacgggataatttcagctgactaaacagaagcattctcagaaccttcttcgtgatgtctgcattcaactcacagtgtggaacctttctttgatagttcaggtttgaaacactctttttgtagaaactgcaaggggataattgcacttctttgaggcctaccgtagtaaaggaaataacttcctatagaaagaagacagaagcattctcagaaccctcttcgtgatgtttgcattcaactcacagtgctgaacctttctttgatagttcagctttgaaacactcttcttgtagaaactgcaagtggatatttggtcctctctgaggatttcgttggaaacgggataaaccgcacagaactaaacagaagaattctcagagccctcttcgtgatgtttgcattcaactcacagtgctgaacctttctttgatagtgcagctttgaaacactctttttgtagaaactgcaagtggatgtttggtcctctctgaggatttcgttggaaacgggataaaccgcacagaactaaaacagaagcattgtcagaaacttctttgtgatgattgcattcaactcacagagttgaaggttccttttcaaacagcagtttccaatcactctttctgtggaatctgcaagtggatatttgggcctctctgaggatttcgttggaaacgggataaaacgcacagaactaaaacagaagcattctcagaaacttctctgtgatgtttgtgttcaactcccagagtttcacgttgcttttcatagagtagttctgaaacatgcttttcgtagtgtctgcaagtggacatttggagcgctttcaggcctgtggtggaaaacgaattatggtcacataaaaactggagagaagccttctcagaaacttctctgtgatgattgcattcaactcacagagttgaaccctcctatggatagagcagtgttgaaactctctttttgtggaatctgcaagtggatatgtggacctctccgaagatgtctttggaaacgggaatatcttcacataaaaactaaacagaagcattctcagaaacttcttggtgatgtttgcattcaaatcccagagttgaaccttcctttgatagttcaggtttgaaacactctttctgtaggatctgcaagtggctatttggaccactctgtggccttcgttcgaaacgggtatatcttcgcataaaatctagacagaagcattctcagaaaatactttgtgatgattgagtttaaatcacagagctgaccattcctttggatggagcaggtttgagacacactttttgtagaatctacaagtggatatttggacctctctgaggatttcgttggaaacgggataactgcacctaactaaacggaagcattctcagaaactgctttgtgatgattgcattcacctcacagagttgaacattcctattgatagagcagtttggaaacactcttgttgtggaatgtgcaagtggagatttggagcgctttgaggcctatggtagtaaagggaatagcttcatagaaaaactagacagatgcattctcaggaactttttggtgatgtttgtattcaactcccagagttgaactttcctttggaaagagcagctatgaaacactctttttctagaatctgcaagtggacgtttggagggctttgtggtttgtggtggaaaaggaaatatcttcacctaaatactagatagaagcatcctcagaagcttctctgtgatgactgcattcaactcacggagttgaacactccttttgagagcgcagttttgaaactctctttctgtggcatctgcaaggggacatgtagacgtctttgaagatttcgttggaaacggaatcatcttcacataaaaactacacagaagcagtctcagaatcttctttgtgatgtttgcattcaaatcccagagttgaacttccctttcaaagttcacgtttgaaacactctttttgcaggatctacaagtggatatttggaccactctgtgtccttcgttcgaaacgggtatatcttcacatgacatctagacagaagctttctcagaaaattctttgggatgattgagttgaactcacagagctgaacattccttgcgatggagcagtttagaaacacactttctgcagaatctgcaagtgcatatttggacgtctctgaggaattcgttggaaacgggataatttcagctgactaaacagaagcattctcagaaccttcttcgtgatgtctgcattcaactcacagtgtggaacctttctttgatagttcaggtttgaaacactctttttgtggaaactgcaaggggataatagcacttctttgaggcctaccgtagtaaaggaaataacttcttataaaaagaagacagaagcattctcagaaccctcttcgtgatgtttgcattcaactcacagtgctgaacctttctttgatagttcagctttgaaacactcttcttgtagaaactgcaagtggatatttggtcctctctgaggatttcgttggaaacgggataaaccgcacagaactaaacagaagaattctcagagccctcttcgtggtgtttgcattcaactcacagtgctgaacctttctttgatagtgcagctttgaaacactctttttgtagaaactgcaagtggatatttggtcctctctgaggatttcgttggaaacgggataaaccgcacagaactaaaacagaagcattcacagaaaactcttggtgacgactgagtttaactcacagagctgaacattcctttggatggagcagtttcgaaacacactatttgtagaatctgcaagtggatatttgggcctctctgaggatttcgttggaaacgggataaaacgcacagaactaaaacagaagcattctcagaaactactttgtgatgattgcattcaagtcacagagttgaacattccctttgacagagcagtttggaaactctctttgtgtagaatctgcaagtggagatatggaccgctttgaggcctatggtagtaaaggaaataccttcatataaaagctagacagtagcattctcagaaacttctttgtgatgcttgcattcaactcacagagttgaactttcctttcgagagagaagctttgaaacactctttttccagaatgtgcaagtggacatttggggagctttgaggcctgtggtggaaaaggaattgtcttcccgtaaaagctagatagaagcattgtcagaaacttctttgagatgattgcattcaactcacagagttgaaggttccttttcaaacagcagtttccaatcactctttctgtggaatctgcaagtggatatttcaacctctttgaagatttcgttggaaacgggagaatcttcacagaaaagctaaacagaagcattctcagaaacttcttggtgatgtttgcattcaaatcccagagttgaaccttcctttgatagttcaggtttgaaacttcgtagtgtctgcaagtggacatttggagcgctttcaggcctgtggtggaaaacgaattatggtcacataaaaactggagagaagcattctcagaaaatactttgtgatgattgagtttaactcacagagctgaacattcctttggatggagcaggtttgagacacactttttgtagaatctacaagtggatatttggacctctctgaggatttcgttggaaacgggataactgcacctaactaaacggaagcattctcagaaactgctttgtgatgattgcattcacctcacagagttgaacattcctattgatagagcagtttttaaacactcttgttgtggaatgtgcaagtggagatttggagcgctttgaggcctatggtagtaaagggaatagcttcatagaaaaactagacagatgcattctcaggaactttttggtgatgtttgtattcaactcccagagttgaactttcctttggaaagagcagctatgaaacactctttttctagaatctgcaagtggacgtttggagggctttgtggtttgtggtggaaaaggaaatatcttcacctaaatactagatagaagcattctcagaagcttctctgtgatgactgcattcaactcacggagttgaacactccttttgagagcgcagttttgaaactctctttctgtggcatctgcaaggggacatgtagacctctttgaagatttcgttggaaacggaatcatcttcacataaaaactatacagaagcagtctcagaatcttctttgtgatgtttgcattcaaatcccagagttgaactttcctttcaaagttcacgtttgaaacactctttttgcaggatctacaagtggatatttggaccactctgtgtccttcgttcgaaacgggtatatcttcacacgacatctagacagaagctttctcagaaaattctttgggatgattgagtggaactcacagagctgaacattccttgcgatggagcagtttagaaacacactttctgcagaatctgcaagtgcatatttggacctctctgaggaattcgttggaaacgggataatttcagctgactaaacagaagcattctcagaaccttcttcgtgatgtctgcattcaactcacagtgtggaacctttctttgatagttcaggtttgaaacactctttttgtagaaactgcaaggggataattgcacttctttgaggcctaccgtagtaaaggaaataacttcctatagaaagaagacagaagcattctcagaaccctcttcgtgatgtttgcattcaactcacagtgctgaacctttctttgatagttcagctttgaaacactcttcttgtagaaactgcaagtggatatttggtcctctctgaggatttcgttggaaacgggataaaccgcacagaactaaacagaagaattctcagagccctcttcgtgatgtttgcattcaactcacagtgctgaacctttctttgatagtgcagctttgaaacactctttttgtagaaactgcaagtggatgtttggtcctctctgaggatttcgttggaaacgggataaaccgcacagaactaaaacagaagcattgtcagaaacttctttgtgatgattgcattcaactcacagagttgaaggttccttttcaaacagcagtttccaatcactctttctgtggaatctgcaagtggatatttgggcctctctgaggatttcgttggaaacgggataaaacgcacagaactaaaacagaagcattctcagaaacttctctgtgatgtttgtgttcaactcccagagtttcacgttgcttttcatagagtagttctgaaacatgcttttcgtagtgtctgcaagtggacatttggagcgctttcaggcctgtggtggaaaacgaattatggtcacataaaaactggagagaagccttctcagaaacttctctgtgatgattgcattcaactcacagagttgaaccctcctatggatagagcagtgttgaaactctctttttgtggaacctgcaagtggatatgtggacctctccgaagatgtctttggaaacgggaatatcttcacataaaaactaaacagaagcattctcagaaacttcttggtgatgtttgcattcaaatcccagagttgaaccttcctttgatagttcaggtttgaaacactctttctgtaggatctgcaagtggctatttggaccactctgtggccttcgttcgaaacgggtatatcttcgcataaaatctagacagaagcattctcagaaaatactttgtgatgattgagttaaaatcacagagctgaacattcctttggatggagcaggtttgagacacactttttgtagaatctacaagtggatatttggacctctctgaggatttcgttggaaacgggataactgcacctaactaaacggaagcattctcagaaactgctttgtgatgattgcattcacctcacagagttgaacattcctattgatagagcagtttggaaacactcttgttgtggaatgtgcaagtggagatttggagcgctttgaggtctatggtagtaaagggaatagcttcatagaaaaactagacagatgcattctcaggaactttttggtgatgtttgtattcaactcccagagttgaactttcctttggaaagagcagctatgaaacactgtttttctagaatctgcaagtggacgtttggagggctttgtggtttgtggtggaaaaggaaatatcttcacctaaatactagatagaagcatcctcagaagcttctctgtgatgactgcattcaactcacggagttgaacactccttttgagagcgcagttttgaaactctctttctgtggcatctgcaaggggacatgtagacctctttgaagatttcgttggaaacggaatcatcttcacataaaaactatacagaagcagtctcagaatcttctttgtgatgtttgcattcaaatccccgagttgaactttcctttcaaagttcacgtttgaaacactctttttgcaggatctacaagtggatatttggaccactctgtgtccttcgttcgaaacgggtatatcttcacatgacatctagacagaagctttctcagaaaattctttgggatgattgagttgaactcacagagctgagcattccttgcgatgtagcagtttagaaacacactttctgcagaatctgcaagtgcatatttggacctctgtgaggaattcgttggaaacgggataatttcagctgactaaacagaagcattctcagaaccttcttcgtgatgtctgcattcaactcacagtgtggaacctttctttgatagttcaggtttgaaacactctttttgtagaaactgcaaggggataattgcactctttgaggagtaccgtagtaaaggaaataacttcctataaaaagaagacagaagcattctcagaaccctcttcgtgatgtttgcattcaactcacagtgctgaacctttctttgatagttcagctttgaaacactctttttgtagaaactgcaagtggatatttggtcctctctgagcatttcgttggaaacgggataaactgcacagaactaaacagaagcattctcagaaccttcttcgtgatgtttgcattcaactcacagtgttgaacctttctttgatagttcaggtttgaaacggtctttctgtagaaactgcaagtagatatttggacctctctgaggatttcgttggaaacgggataacccgcacagaactaaaacagaagcattcacagaaaactcttggtgacgactgagtttaactcacagagctgaacattccctttggatggagcagtttcgaaacacactatttgtagaatgtgcaagtggatatttaggcctctctgaggatttcgttggaaacgggataaaccgcacagaactaaacagaagcattctcagaaactactttgtgatgattgcattcaagtcacagagttgaacattccctttgacagagcagtttggaaactctctttgtgtagaatctgcaagtggagatatggaccgctttgaggcctatggtagtaaaggaaatagcttcatataaaagctagacagtagcattctcagaaacttctttgtgatgcttgcattcaactcacagagttgaactttcctttcgagagagaagctttgaaacactctttttccagaatctgcaagtggacatttggagggatttgaggcctgtggtggaaaaggaattatcttcccgtaaaagctagatagaagcattgtcagaaacttctttgtgatgattgcattcaactcacagagttgaaggttcctttacaaacagcaggttccaatcactctttctgtggaatctgcaagtggatatttggacctctttgaagatttcattggaaacgggagaatcttcacagaaaagctaaacagaagcattctcagaaacttctctgtgatgtttgtgttcaactcccagagtttcacattgcttttcatagagtagttctgaaacatgcttttcgtagtgtctgcaagtggacatttggagcgctttcaggcctgtggtggaaaacgaattatggtcacataaaaactggagagaagccttctcagaaacttctctgtgatgattgcattcaactcacagagttgaaccctcctatggatagagcagtgttgaaactctctttttgtggaatatgcaagtggatatgtggacctctccgaagatgtctttggaaacgggaatatcttcacataaaaactaaacagaagcattctcagaaacttcttggtgatgtttgcattcaaatcccagagttgaaccttcctttgatagttcaggtttgaaacactctttttgtaggatctgcaagtggatatttggaccactctgtggccttcgttcgaaacgggtacatcttcgcataatatctagacagaagcattctcagaaaatactttgtgatgattgagttgaactcacagagctgaacattcctttggatggagcaggtttgagacacactttttgtagaatctacaagtggatatttggacctctctgaggatttcgttggaaacgggataactgcacctaactaaacggaagcattctcagaaactgctttttcatgattgcattcacctcacagagttgaacattcctattgatagagcagtttggaaacactcttgttgtggaatgtgcaagtggagatttggagcgctttgaggcctatggtagtaaagggaatagcttcatagaaaaagtagacagatgcattctcaggaactttttggtgatgtttgtattcaactcccagagttgaactttcctttggaaagagcagctatgaaacactctttttctagaatctgcaagtggacgtttggagggctttgtggtttgtggtggaaaaggaaatatcttcacctaaatactacatagaagcattctcagaagcttctctgtgatgactgcattcaactcacggagttgaacactccttttgagagcgcagttttgaaactctctttctgtggcatctgcaaggggacatgtagacctctttgaagatttcgttggaaacggaatcatcctcacatcaaaactatacagaagcagtctcagaatcttctttgtgatgtttgcattcaaatcccagagttgaactttcctttcaaagttcaggtttgaaacactctttttgctggatctacaagtggatatttggaccactctgtgtccttcgttcgtaacgggtatatcttcacatgacatctagacagaagctttctcagaaaattctttgggatgattgagttgaactcacagagctgaacattccttgcgatggagcagtttagaaacacactttctgcagaatctgcaagtgcatatttggacctctctgaggaattcgttggaaacgggataatttcagctgactaaacagaagcattctcagaaccttcttcgtgatgtctgcattcaactcacagtgtggaacctttctttgatagttcaggtttgaaacactctttttgtggaaactgcaaggggataattgcacttctttgaggcctaccgtagtaaaggaaataacttcctataaaaagaagacagaagcattctcagaaccctcttcgtgatgtttgcattcaacacacagtgctgaacctttctttgatagttcagctttgaaacactctttttgtagaaactgcaactggatattttgtcctctctgaggatttcgttggaaacgggataaaccgcacagaactaaacagaagcattcacagaaaactcttggtgacgactgagtttaactcacagagctgaacattcctttggatggagcagtttcgaaacacactatttgtagaatctgcaagtggatatgtgggcctctctgaagatttcgttggaaacgggataaaccgcacagaactaaaacagaagcattctcagaaactactttgtgatgattgcattcaagtcacagagctgaacattccctttgacagagcagtttggaaactctctttgtgtagaatctgcaagtggagatatggaatgctttgaggactatggtagtaaaggaaatagcttcatataaaagctagacagtagcattctcagaaacttctttgtgatgcttgcattcaactcacagatgttgaactttcctttcgagagagaagctttgaaacactctttttccagaatctgcaagtggacatttggagggctttgaggcctgtggtggaaaaggaattatcttcccgtaaaagctagatagaagcattgtcagaaacttctttgtgatgattgcattcaactcacagagttgaaggttccttttcaaacagcagtttccaaacactctttctgtggaatctgcaagtggatgtttggacctctttgaagatttcgttggaaacgggagaatcttcacagaaaagctaaacagaagcattctcagaaacttctctgtgatgtttgtgttcaactcccagagtttcacattgcttttcatagagtagttctgaaacatgcttttcgtagtgtctacaagtggacatttggagcgctttcaggcctgtggtggaaaacgaattatggtcacataaaaactggagagaagccttctcagaaacttctctgtgatgattgcattcaactcacagagttgaaccctcctatggatagagcagtgttgaaactctctttttgtggaatctgcaagtggatatgtggacctctccgaagatgtctttggaaacgggaatatcttcacataaaaactaaacagaagcattctcagaaacttcttggtgatgtttgcattcaaatcccagagttgaaccttcctttgatagttcaggtttgaaacactctttttgtaggatctgcaagtggatatttggaccactctgtggccttcgttcgaaacgggtatatcttcgcataaaatccagacagaagcattctcagaaaatactttgtgatgattgagtttaactcacagagctgaacattcctttggatggagcaggtttgagacacacatttgtagaatctacaagtggatatttggacctctctgaggatttcgttggaaacgcgataactgcccctaactaaacggaagcattctcagaaactgctttgtgatgattgcattcacctcacagagttgaacattcctattgatagagcagtttggaaacactcttgttgtggaatgtgcaagtggagatttggagcgctttgaggcctgtggtagtaaagggaatagcttcatagaaaaactagacagatgcattctcaggaactttttggtgatgtttgtattcaactcccagagttgaactttcctttggaaagagcagctatgaaacactctttttctagaatctgcaagtggacgtttggagggctttgtggtttgtggggaaaaggaaatatcttcacctaaatactagatagaagcattctcagaagcttctctgtgatgactgcattcaactcacggagttgaacactccttttgagagcgcagttttgaaactctctttctgtggcatctgcaaggggacatgtagacctctttgaagatttcgttggaaacggaatcatcttcacataaaaactatacagaagcagtctcagaatcttctttgtgatgtttgcattcaaatcccagagttgaactttcctttcaaagttcacgtttgaaacactctttttgcaggatctacaagtggatatttggaccactctgtgtccttcgttcgaaacgggtatatcttcacacgacatctagacagaagctttctcagaaaattctttgggatgattgagtggaactcacagagctgaacattccttgcgatggagcagtttagaaacacactttctgcagaatctgcaagtgcatatttggacctctctgaggaattcgttggaaacgggataatttcagctgactaaacagaagcattctcagaaccttcttcgtgatgtctgcattcaactcacagtgtggaacctttctttgatagttcaggtttgaaacactctttttgtagaaactgcaaggggataattgcacttctttgaggcctaccgtagtaaaggaaataacttcctatagaaagaagacagaagcattctcagaaccctcttcgtgatgtttgcattcaactcacagtgctgaacctttctttgatagttcagctttgaaacactcttcttgtagaaactgcaagtggatatttggtcctctctgaggatttcgttggaaacgggataaaccgcacagaactaaacagaagaattctcagagccctcttcgtgatgtttgcattcaactcacagtgctgaacctttctttgatagtgcagctttgaaacactctttttgtagaaactgcaagtggatatttggtcctctctgaggatttcgttggaaacgggataaaccgcacagaactaaaacagaagcattcacagaaaactcttggtgacgactgagtttaactcacagagctgaacattcctttggatggagcagtttcgaaacacactatttgtagaatctgcaagtggatatttgggcctctctgaggatttcgttggaaacgggataaaacgcacagaactaaaacagaagcattctcagaaactactttgtgatgattgcattcaagtcacagagttgaagattccctttgacagagcagcttggaaactatctttgtgtagaatctgcaagtggagatatggaccgctttgaggcctatggtagtaaaggaaatagcttcatataaaagctagacagtagcattctcagaaacttctttgtgatgcttgcattcaacttacagagttgaactttcctttcgagagagaagctttgaaacactctttttccagaatctgcaagtggacatttggagggctttgaggcctgtggtggaaaaggaattatcttcccgtaaaagctagatagaagcattgtcagaaacttctttgtgatgattgcattcaactcacagagttgaaggttccttttcaaagagcagtttccaatcactctttctgtggaatctgcaagtggatatttggacctctttgaagatttcgttggaaacgggagaatcttcacagaaaagctaaacagaagcattctcagaaacttctctgtgatgtttgtgttcaactcccagaatttcagattgcctttcatagagtagttctgaaacatgcttttcgtagtgtctgcaagtggacatttggagcgctttcaggcctgtggtggaaaacgatttatggtcccataaaacctggagagaagccttctcagaaacttctctgtgatgattgcattcaactcacagagttgaaccctcctatggatagagcagtgttgaaactctctttttgtggaatctgcaagtggatatgtggacctctccgaagatgtctttggaaacgggaatatcttcacataaaaactaaacagaagcattctcagaaacttcttggtgatgtttgcattcaaatcccagagttgaaccttcctttgatagttcaggtttgaaacactctttttgtaggatctgcaagtggatatttggaccactctgtggccttcgttcgaaacgggtatatcttcgcataaaatccagacagaagcattctcagaaaatactttgtgatgattgagtttaactcacagagctgaacattcctttggatggagcaggtttgagacacacatttgtagaatctacaagtggatatttggacctctctgaggatttcgttggaaacgcgataactgcacctaactaaacggaagcattctcagaaactgctttgtgatgattgcattcacctcacagagttgaacattcctattgatagagcagtttggaaacactcttgttgtggaatgtgcaagtggagatttggagcgctttgaggcctatggtagtaaagggaatagcttcatagaaaaactagacagatgcattctcaggaactttttggtgatgtttgtattcaactcccagagttgaactttcctttggaaagagcagctatgaaacactctttttctagaatctgcaagtggacgtttggagggctttgtggtttgtggtggaaaaggaaatatcttcacctaaatactagatagaagcattctcagaagcttctctgtgatgactgcattcaactcacggagttgaacactccttttgagagcgcagttttgaaactctctttctgtggcatctgcaaggggacatgtagacctctttgaagatttcgttggaaacggaatcatcttcacataaaaactatacagaagcagtctcagaatcttctttgtgatgtttgcattcaaatcccagagttgaactttcctttcaaagttcacgtttgaaacactctttttgcaggatctacaagtggatatttggaccactctgtgtccttcgttcgaaacgggtatatcttcacatgacatctagacagaagctttctcagaaaattctttgggatgattgagttgaactcacagagctgaacattccttgcgatggagcagtttagaaacacactttctgcagaatctgcaagtgcatatttggacctctctgaggaattcgttggaaacgggataatttcagctgactaaacagaagcattctcagaaccttcttcgtgatgtctgcattcaactcacagtgtggaacctttctttgatagttcaggtttgaaacactctttttgtagaaactgcaaggggataattgcacttctttgaggcctaccgtagtaaaggaaataacttcctataaaaagaagacagaagcattctcagaaccctcttcgtgatgtttgcattcaactcacagtgctgaacctttctttgatagttcagctttgaaacaatctttttgtagaaactgcaagtggatacttggtcctctctgaggatttcgttggaaaagggataaaccgcacagaactaaacagaagcattcacagaaaactcctgttgacgactgagtttaactcacagagctgaacattcccttggttggagcagtttcgaaacacactctttttggaatctgcaggtggatatttgggcctctctgaggatttcgttggaaacgggataaaccgcacagaactaaaacagaagcattctcagaaactactttgtgatgattgcattcaagtcacagagctgaacattccctttgacggagcagtttggaaactctctttgtgtagaatctgcaagtggagatatggaatgctttgaggactatggtagtaaaggaaatagcttcatataaaagctagacagtagcattctcagaaacttctttgtgatgcttgcattcaactcacagagttgaactttcctttcgagagagaagctttgaaacactctttttccagaatctgcaagtggacatttggagggctttgaggcctgtggtggaaaaggaattatcttcccataaaagctagatagaagcattgtcagaaacatcttcgtgatgattgcattcaactcacagagttgaaggttccttttcaaacagcagtttccaaacactatttctgtggaatctgcaagtggatatttggacctctttgaagatttcgttggaaacgggagaatcttcacagaaaagctaaacagaagcattctgagaaacttctttgtgatgtttgtgttcaactcccagagtttcacattgcttttcatagagtagttctgaaacatgcttttcgtagtgtctgcaagtggacatttggagcgctttcaggcctgtggtggaaaacgatttatggtcacataaaaactggagagaagccttctcagaaacttctctgtgatgattgcattcaactcacagagttgaaccctcctatggatagagcagtgttgaaactctctttttgtggaacctgcaagtggatatgtggacctctccgaagatgtctttggaaacgggaatatcttcacataaaaactaaacagaagcattctcagaaacttcttggtgatgtttgcattcaaatcccagagttgaaccttcctttgatagttcaggtttgaaacactctttctgtaggatctgcaagtggctatttggaccactctgtggccttcgttcgaaacgggtatatcttcgcataaaatctagacagaagcattctcagaaaatactttgtgatgattgagtttaaatcacagagctgaccattcctttggatggagcaggtttgagacacactttttgtagaatctacaagtggatatttggacctctctgaggatttcgttggaaacgggataactgcacctaactaaacggaagcattctcagaaactgctttgtgatgattgcattcacctcacagagttgaacattcctattgatagagcagtttggaaacactcttgttgtggaatgtgcaagtggagatttggagcgctttgaggcctatggtagtaaagggaatagcttcatagaaaaactagacagatgcattctcaggaactttttggtgatgtttgtattcaactcccagagttgaactttcctttggaaagagcagctatgaaacactctttttctagaatctgcaagtggacgtttggagggctttgtggtttgtggtggaaaaggaaatatcttcacctaaatactagatagaagcattctcagaagcttctctgtgatgactgcattcaactcacggagttgaacactccttttgagagcgcagttttgaaactctctttctgtggcatctgcaaggggacatgtagacctctttgaagatttcgttggaaacggaatcatcttcacataaaaactatacagaagcagtctcagaatcttctttgtgatgtttgcattcaaatcccagagttgaactttcctttcaaagttcacgtttgaaacactctttttgcaggatctacaagtggatatttggaccactctgtgtccttcgttcgaaacgggtatatcttcacaggacatctagacagaagctttctcagcaaaattctttgggatgattgagtggaactcacagagctgaacattccttgcgatgtagcagtttagaaacacactttctgcagaatctgcaagtgcatatttggacctctctgaggaattcgttggaaacgggataatttcagctgactaaacagaagcattctcagaaccttcttcgtgatgtctgcattcaactcacagtgtggaacctttctttgatagttcaggtttgaaacactctttttgtagaaactgcaaggggataattgcacttctttgaggcctaccgtagtaaaggaaataacttcctatagaaagaagacagaagcattctcagaaccctcttcgtgatgtttgcattcaactcacagtgctgaacctttctttgatagttcagctttgaaacactcttcttgtagaaactgcaagtggatattttgtcctctctgaggatttcgttggaaaagggataaaccgcacagaactaaacagaagcattctcagagccctcttcgtgatgtttgcattcaactcacagtgctgaacctttctttgatagtgcagctttgaaacactctttttgtagaaactgcaagtggatgttttgtcctccctgaggatttcgttggaaacgggataaaccgcacagaactaaaacagaagcattctcagaaccttcttcgtgatgtttgcattcaactcacagtgttgaacctttctttgatagttcaggtttgaaacggtctttctgtagaaactgcaagtagatatttggacctctctgaggatttcgttggaaacgggataaaccgcacagaactaaaacagaagctttctcagaaaattgtttgggatgattgatttgaactcacagagctgagcattcctttggatggagcagtttcgaaacacactatttgtagaatgtgcaagtgtatatgtgggcctctctgaggatttcgttggaaacgggataaaccgcacagaactaaacagaagcattctcagaaactactttgtgatgattgcattcaagtcacagagcagaacattccctttgacagagcagtttggaaactctctttgtgtagcatctgcaagtggagatatggaatgctttgaggactatggtagtaaaggaaatagcttcatataaaagctagacagtagcattctcagaaacttctttgtgatgcttgcattcaactcacagagttgaactttcctttcgagagagaagctttgaaacactctttttccagaatctgcaagtggacatttggagggctttgaggcctgtggtggaaaaggaattatcttcccgtaaaagctagatagaaacattgtcagaaacttctttgtgatgattgcattcaactcacagagttgaaggttccttttcaaacagcagtttccaaacactctttctgtggaatctacaagtggatatttggacctctttgaagatttcgttggaaacgggagaatcttcacagaaaagctaaacggaagcattctcagaaacttctctgtgatgtttgtgttcaactcccagagtttcacgttgcttttcatagagtagttctgaaacatgcttttcgtagtgtctgcaagtggacatttggagcgctttcaggcctgtggtggaaaacgaattatggtcacataaaaactggagagaagccttctcagaaacttctctgtgatgattgcattcaactcacagagttgaaccctcctatggatagagcagtgttgaaactctctttttgtggaatctgcaagtggatatgtggacctctccgaagatgtctttggaaacgggaatatcttcacataaaaactaaacagaagcattctcagaaacttcttggtgatgtttgcattcaaatcccagagttgaaccttcctttgatagttcaggtttgaaacactctttctgtaggatctgcaagtggctatttggaccactctgtggccttcgttcgaaacgggtatatcttcgcataaaatctagacagaagcattctcagaaaatactttgtgatgattgagtttaaatcacagagctgaccattcctttggatggagcaggtttgagacacactttttgtagaatctacaagtggatatttggacctctctgaggatttcgttggaaacgggataactgcacctaactaaacggaagcattctcagaaactgctttgtgatgattgcattcacctcacagagttgaccattcctattgatagagcagtttggaaacactcttgttgtggaatgtgcaagtggagatttggagcgctttgaggcctatggtagtaaagggaatagcttcatagaaaaactagacagatgcattctcaggaactttttggtgatgtttgtattcaactcccagagttgaactttcctttggaaagagcagctatgaaacactctttttctagaatctgcaagtggacgtttggagggctttgtggtttgtggtggaaaaggaaatatcttcacctaaatactagatagaagcattctcagaagcttctctgtgatgactgcattcaactcacggagttgaacactccttttgagagcgcagttttgaaactctctttctgtggcatctgcaaggggacatgtagacctctttgaagatttcgttggaaacggaatcatcttcacataaaaactatacagaagcagtctcagaatcttctttgtgatgtttgcattcaaatccccgagttgaactttcctttcaaagttcacgtttgaaacactctttttgcaggatctacaagtggatatttggaccactctgtgtccttcgttcgaaacgggtatatcttcacatgacatctagacagaagctttctcagaaaattctttgggatgattgagttgaactcacagagctgagcattccttgcgatgtagcagtttagaaacacactttctgcagaatctgcaagtgcatatttggacctctgtgaggaattcgttggaaacgggataatttcagctgactaaacagaagcattctcagtaaccttcttcgtgatgtctgcattcaactcacagtgtggaacctttctttgatagttcaggtttgaaacactctttttgtagaaactgcaaggggataattgcacttctttgaggcctaccgtagtaaaggaaataacttcctataaaaagaagacagaagcattctcagaaccctcttcctgatgtttgcattcaactcacagtgctgaacctttctttgatagttcagctttgaaacactctttttgtagaaactgcaagtggatatttggtcctctctgaggatttcgttggaaacgggataaactgcacagaactaaacagaagcattctcagaaccttcttcgtgatgtttgcattcaactcacagtgttgaacctttctttgatagttcaggtttgaaacggtctttctgtagaaactgcaagtagatatttggacctctctgaggatttcgttggaaacgggataacccgcacagaactaaaacagaagcattcacagaaaactcttggtgacgactgagtttaactcacagagctgaacattcctttggatggagcagtttcgaaacacactatttgtagaatgtgcaagtggatatttaggcctctctgagggtttcgttggaaacggggtaaaccgcacagaactaaacagaagcattctcagaaactactttgtgatgattgcattcaagtcacagagttgaacattccctttgacagagcagtttggaaactctctttgtgtagaatctgcaagtggagatatggaccgctttgaggcctatggtagtaaaggaaatagcttcatataaaagctagacagtagcattctcagaaacttctttgtgatgcttgcattcaactcacagagttgaactttcctttcgagagagaagctttgaaacactctttttccagaatgtgcaagtggacatttggggagctttgaggcctgtggtggaaaaggaattatcttcccgtaaaagctagatagaagcattgtcagaaacttctttctgatgattgcattcaactcacagagttgaaggttccttttcaaacagcagtttccaatcactctttctgtggaatctgcaagtggatatttcgacctctttgaagatttcgttggaaacgggagaatcttcacagaaaagctaaacagaagcattctcagaaacttctctgtgatgtttgtgttcaactcccagagtttcacgttgcttttcatagagtagttctgaaacatgcttttcgaagtgtctgcaagtggacatttggagcgctttcaggcctgtggtggaaaacgaattatggtcacataaaaactggagagaagctttctcagaaacttctctgtgatgattgcattcatctcacagagttgaaccctcctatggatagagcagtgttgaaactctgtttttgtggaatctgcaagtggatatgtggacctcgccaaagatgtctttggaaacgggaatatcttcacataaaaactaaacagaagcattctcagaaacttcttggtgatgtttgcattcaaatcccagagttgaaccttcctttgatagttcaggtttgaaacactctttttgtaggatgtgcaagtggatatttggaccactctgtggccttcgttcaaaacgggtacatcttcgcataatatctagacagaagcattctcagaaaatactttgtgatgattgagtttaaatcacagagctgaccattcctttggatggagcaggtttgagacacactttttgtagaatctacaagtggatatttggacctctctgaggatttcgttggaaacgggataactgcacctaactaaacggaagcattctcagaaactgctttgtgatgattgcattcacctcacagagttgaacattcctattgatagagcagtttggaaacactcttgttgtggaatgtgcaagtggagatttggagcgctttgaggcctatggtagtaaagggaatagcttcatagaaaaactagacagatgcattctcaggaaccttttggtgatgtttgtattcaactcccagagttgaactttcctttggaaagagcagctatgaaacactctttttctagaatctgcaagtggacgtttggagggctttgtggtttgtggtggaaaaggaaatatcttcacctaaatactagatagaagcattctcagaagcttctctgtgatgactgcattcaactcacggagttgaacactccttttgagagcgcagttttgaaactctctttctgtggcatctgcaaggggacatgtagacctctttgaagatttcgttggaaacggaatcatcttcacataaaaactatacagaagcagtctcagaatcttctttgtgatgtttgcattcaaatcccagagttgaactttcctttcaaagttcacgtttgaaacactctttttgcaggatctacaagtggatatttggaccactctgtgtccttcgttcgaaacgggtatatcttcacacgacatctagacagaagctttctcagaaaattctttgggatgattgagtggaactcacagagctgaacattccttgcgatggagcagtttagaaacacactttctgcagaatctgcaagtgcatatttggacctctctgaggaattcgttggaaacgggataatttcagctgactaaacagaagcattctcagaaccttcttcgtgatgtctgcattcaactcacagtgtggaacctttctttgatagttcaggtttgaaacactctttttgtagaaactgcaaggggataattgcacttctttgaggcctaccgtagtaaaggaaataacttcctatagaaagaagacagaagcattctcagaaccctcttcgtgatgtttgcattcaactcacagtgctgaacctttctttgatagttcagctttgaaacactcttcttgtagaaactgcaagtggatatttggtcctctctgaggatttcgttgggaaacgggataaaccgcacagaactaaacagaagcattctcagaaccttcttcgtgatgtttgcattcaactcacagtgttgaacctttctttgatagttcaggtttgaaacgatctttctgtagaaactgcaagtagatatttggacctctctgaggatttcgttggaaacgggataaaccgcacagaactaaaacagaagcattcacagaaaactcttggtgacgactgagtttaactcacagagctgaacattcctttggatggagcagtttcgaaacacactatttgtagaatctgcaagtggatatgtgggcctctctgaggatttcgttggaaacgggtaaatcgcacagaactaaacagaagcattctcagaaactactttgtgatgattgcattcaagtcacagagttgaacattccgtttgacagagcagtatggaaactctctttgtgtagaatctgcaagtggagatatggaccgctttgaggcctatggtagtaaagggaatagcttcatagaaaaactagacagtagcattctcagaaacttctttgtgatgcttgcattcaactcacagagttgaactttcctttcgagagagaagctttgaaacactctttttccagaatctgcaagtggacatttggagggctttgaggcctgtggtggaaaaggaattatcttcccgtaaaagctagatagaagcattgtcagaaacttctttgtgatgattgcattcaactcacagagttgaaggttccttttcaaagagcagtttccaatcactctttctgtggaatctgcaagtggatatttggacctctttgaagatttcgttggaaacgggagaatcttcacagaaaagctaaagagaagcattctcagaaacttctctgtgatgtttgtgttcaactcccagagtttcacattgcttttcatagagtagttctgaaacatgcttttcgtagtgtctgcaagtggacatttggagcgctttcaggcctgtggtggaaaacgaattatggtcacataaaaactggagagaagccttctcagaaacttctctgtgatgattgcattcaactcacagagttgaaccctcctatggatagagcattgttgaaactctctttttgtggaatctgcaagtggatatgtggacctctccgaagatgtctttggaaacgggaatatcttcacataaaaactaaacagaagcattctcagaaacttcttggtgatgtttgcattcaaatcccagagttgaaccttcctttgatagttcaggtttgaaacactctttttgtaggatctgcaagtggatatttggaccactctgtggccttcgttcgaaacgggtacatcttcccataaaatctagacagaagcattctcagaaaatactttgtgatgattgagtttaactcacagagctgaacattcctttggatggagcaggtttgagacacactttttgtagaaactacaagtggatatttggacctctctgaggatttcgttggaaacgcgataactgcacctaattaaacggaagcattctcagaaactgctttgtgatgattgcattcacctcacagagttgaacattcctattgatagagcagtttggaaacactcttgttgtggaatgtgcaagtggagacttggagcattttgaggcctatggtagtaaagggaatagcttcatagaaaaactagacagatgcattctcaggaactttttggtgatgtttgtattcaactcccagagttgaactttcctttggaaagagcagctatgaaacactctttttctagaatctgcaagtggacgtttggagggctttgtggtttgtggtggaaaaggaaatatcttcacctaaatactagatagaagcattctcagaagcttctctgtgatgactgcattcaactcacggagttgaacactccttttgagagcgcagttttgaaactctctttctgtggcatctgcaaggggacatgtagacctctttgaagatttcgttggaaacggaatcatcttcacataaaaactatacagaagcagtctcagaatcttctttgtgatgtttgcattcaaatcccagagttgaactttcctttcaaagttcacgtttgaaacactctttttgcaggatctacaagtggatatttggaccactctgtgtccttcgttcgaaacgggtatatcttcacacgacatctagacagaagctttctcagaaaattctttgggatgattgagtggaactcacagagctgaacattccttgcgatgtagcagtttagaaacacactttctgcagaatctgcaagtgcatatttggacctctctgaggaattcgttggaaacgggataatttcagctgactaaacagaagcattctcagaaccttcttcgtgatgtctgcattcaactcacagtgtggaacctttctttgatagttcaggtttgaaacactctttttgtagaaactgcaaggggataattgcacttctttgaggcctaccgtagtaaaggaaataacttcctatagaaagaagacagaagcattctcagaaccctcttcgtgatgtttgcattcaactcacagtgctgaacctttctttgatagttcagctttgaaacactcttcttgtagaaactgcaagtggatatttggtcctctctgaggatttcgttggaaacgggataaaccgcacagaactaaacagaagaattctcagagccctcttcgtgatgtttgcattcaactcacagtgctgaacctttctttgatagtgcagctttgaaacactctttttgtagaaactgcaagtggatatttggtcctctctgaggatttcgttggaaacgggataaaccgcacagaactaaaacagaagcattcacagaaaactcttggtgacgactgagtttaactcacagagctgaacattcctttggatggagcagtttcgaaacacactatttgtagaatctgcaagtggatatttgggcctctctgaggatttcgttggaaacgggataaaacgcacagaactaaaacagaagcattctcagaaactactttgtgattattgcattcaagtcacagagttgaacattccctttgacagagcagtttggaaactctctttgtgtagaatctgcaagtggagatatggaccgctttgaggcctatggtagtaaaggaaatagcttcatataaaacctagacagtagcattctcagaaacttctttgtgatgcttgcattcaactcacagagttgaactttcctttcgagagagaagctttgaaacactctttttccagaatgtgcaagtggacatttggggagctttgaggcctgtggaggaaaaggaattatcttcccgtaaaagctagatagaagcattgtcagaaacttctttgagatgattgcattcaactcacagagttgaaggttccttttcaaacagcagtttccaatcactctttctgtggaatctgcaagtggatatttcgacctctttgaagatttcgttggaaacgggagaatcttcacagaaaagctaaacagaagcattctcagaaacttctctgtgatgtttgtgttcaactcccagagtttcacgttgcttttcatagagtagttctgaaacatgcttttcgtagtgtctgcaagtggacatttggagcgctttcaggcctgtggtggaaaacgaattatggtcacataaaaactggagagaagccttctcagaaacttctctgtgatgattgcattcaactcacagagttgaaccctcctatggatagagcagtgttgaaactctctttttgtggaatctgcaagtggatatgtggacctctccgaagatgtctttggaaacgggaatatcttcacataaaaactaaacagaagcattctcagaaacttcttggtgatgtttgcattcaaatcccagagttgaaccttcctttgatagttcaggtttgaaacactctttctgtaggatctgcaagtggctatttggaccactctgtggccttcgttcgaaacgggtatatcttcgcataaaatctagacagaagcattctcagaaaatactttgtgatgattgagtttaaatcacagagctgaccattcctttggatggagcaggtttgagacacactttttgtagaatctacaagtggatatttggacctctctgaggatttcgttggaaacgggataactgcacctaactaaacggaagcattctcagaaactgctttgtgatgattgcattcacctcacagagttgaacattcctattgatagagcagtttggaaacactcttgttgtggaatgtgcaagtggagatttggagcgctttgaggcctgtggtagtaaagggaatagcttcatagaaaaactagacagatgcattctcaggaactttttggtgatgtttgtattcaactcccagagttgaactttcctttggaaagagcagctatgaaacactctttttctagaatctgcaagtggacgtttggagggctttgtggtttgtggtggaaaaggaaatatcttcacctaaatactagatagaagcattctcagaagcttctctgtgatgactgcattcaactcacggagttgaacactccttttgagagcgcagttttgaaactctctttctgtggcatctgcaaggggacatgtagacctctttgaagatttcgttggaaacggaatcatcttcacataaaaactatacagaagcagtctcagaatcttctttgtgatgtttgcattcaaatcccagagttgaactttcctttcaaagttcacgtttgaaacactctttttgcaggatctacaagtggatatttggaccactctgtgtccttcgttcgaaacgggtatatcttcacacgacatctagacagaagctttctcagaaaattctttgggatgattgagtggaactcacagagctgaacattccttgcgatgtagcagtttagaaacacactttctgcagaatctgcaagtgcatatttggacctctctgaggaattcgttggaaacgggataatttcagctgactaaacagaagcattctcagaaccttcttcgtgatgtctgcattcaactcacagtgtggaacctttctttgatagttcaggtttgaaacactctttttgtagaaactgcaaggggataattgcacttctttgaggcctaccgtagtaaaggaaataacttcctatagaaagaagacagaagcattctcagaaccctcttcgtgatgtttgcattcaactcacagtgctgaacctttctttgatagttcagctttgaaacactcttcttgtagaaactgcaagtggatatttggtcctctctgaggatttcgttggaaacgggataaaccgcacagaactaaacagaagaattctcagagccctcttcgtgatgtttgcattcaactcacagtgctgaacctttctttgatagtgcagctttgaaacactctttttgtagaaactgcaagtggatgtttggtcctctctgaggatttcgttggaaacgggataaaccgcacagaactaaaacagaagcattgtcagaaacttctttgtgatgattgcattcaactcacagagttgaaggttccttttcaaacagcagtttccaatcactctttctgtggaatctgcaagtggatatttgggcctctctgaggatttcgttggaaacgggataaaacgcacagaactaaaacagaagcattctcagaaacttctctgtgatgtttgtgttcaactcccagagtttcacgttgcttttcatagagtagttctgaaacatgcttttcgtagtgtctgcaagtggacatttggagcgctttcaggcctgtggtggaaaacgaattatggtcacataaaaactggagagaagccttctcagaaacttctctgtgatgattgcattcaactcacagagttgaaccctcctatggatagagcagtgttgaaactctctttttgtggaatctgcaagtggatatgtggacctctccgaagatgtctttggaaacgggaatatcttcacataaaaactaaacagaagcattctcagaaacttcttggtgatgtttgcattcaaatcccagagttgaaccttcctttgatagttcaggtttgaaacactctttctgtaggatctgcaagtggctatttggaccactctgtggccttcgttcgaaacgggtatatcttcgcataaaatctagacagaagcattctcagaaaatactttgtgatgattgagtttaaatcacagagctgaccattcctttggatggagcaggtttgagacacactttttgtagaatctacaagtggatatttggacctctctgaggatttcgttggaaacgggataactgcacctaactaaacggaagcattctcagaaactgctttgtgatgattgcattcacctcacagagttgaacattcctattgatagagcagtttggaaacactcttgttgtggaatgtgcaagtggagatttggagcgctttgaggcctatggtagtaaagggaatagcttcatagaaaaactagacagatgcattctcaggaactttttggtgatgtttgtattcaactcccagagttgaactttcctttggaaagagcagctatgaaacacactttttctagaatctgcaagtggacgtttggagggctttgtggtttgtggtggaaaaggaaatatcttcacctaaatactagacagaagcattctcagaagcttctctgtgatgactgcattcaactcacggagttgaacactccttttgagagcgcagttttgaaactctctttctgtggcatctgcaaggggacatgtagacctctttgaagatttcgttggaaacggaatcatcttcacataaaaactatacagaagcagtctcagaatcttctttgtgatgtttgcattcaaatcccagagttgaactttcctttcaaagttcacgtttgaaacactctttttgcaggatctacaagtggatatttggaccactctgtgtccttcgttcgaaacgggtatatcttcacacgacatctagacagaagctttctcagaaaattctttgggatgattgagtggaactcacagagctgaacattccttgcgatgtagcagtttagaaacacactttctgcagaatctgcaagtgcatatttggacctctctgaggaattcgttggaaacgggataatttcagctgactaaacagaagcattctcagaaccttcttcgtgatgtctgcattcaactcacagtgtggaacctttctttgatagttcaggtttgaaacactctttttgtagaaactgcaaggggataattgcacttctttgaggcctaccgtagtaaaggaaataacttcctatagaaagaagacagaagcattctcagaaccctcttcgtgatgtttgcattcaactcacagtgctgaacctttctttgatagttcagctttgaaacactcttcttgtagaaactgcaagtggatatttggtcctctctgaggatttcgttggaaacgggataaaccgcacagaactaaacagaagaactctcagagccctcttcgtgatgtttgcattcaactcacagtgctgaacctttctttgatagtgcagctttgaaacactctttttgtagaaactgcaagtggatatttggtcctctctgaggatttcgttggaaacgggataaaccacacagaactaaaacagaagcattcacagaaaactcttggtgacgactgagtttaactcacagagctgaacattcctttggatggagcagtttcgaaacacactatttgtagaatctgcaagtggatatttgggcctctctgaggatttcgttggaaacgggataaaacgcacagaactaaaacagaagcattctcagaaactactttgtgatgattgcattcaagtcacagagttgaacattccctttgacagagcagtttggaaactctctttgtgtagaatctgcaagtggagatatggaacgctttgaggcctatggtagtaaaggaaatagcttcatataaaagctagacagtagcattctcagaaacttctttgtgatgcttgcattcaactcactgagttgaactttcctttcgagagagaagctttgaaacactctttttccagaatctgcaagtggacattcggagggctttgaggcctgtggtggaaaaggaattttcttcccgtaaaagctagatagaagcattgtcagaaacttctttgtgatgattgcattcaactcacagagttgaaggttccttttcaaagagcagtttccaatcactctttctgtggaatctgcaagtggatatttggacctctttgaagatttcgttggaaacgggagaatcttcacagaaaagctaaacagaagcattctcagaaacttctctgtgatgtttgtgttcaactcccagagtttcacattgcttctcatagagtagttctgaaacatgcttttcgtagtgtctgcaagtggacatttggagcgctttcaggtctgtggtggaaaacgaattatggtcacataaaaactggagagaagccttctcagaaacttctctgtgatgattgcattcaactcacagagttgaaccctcctatggatagagcagtgttgaaactctctttttgtggaatctgcaagtggatatgtggacctctccgaagatgtctttggaaacgggaatatcttcacataaaaactaaacagaagcattctcagaaacttcttggtgatgtttgcattcaaatcccagagttgaaccttcctttgatagttcaggtttgaaacactctttctgtaggatctgcaagtggctatttggaccactctgtggccttcgttcgaaacgggtatatcttcgcataaaatctagacagaagcattctcagaaaatactttgtgatgattgagtttaaatcacagagctgaccattcctttggatggagcaggtttgagacacactttttgtagaatctacaagtggatatttggacctctctgaggatttcgttggaaacgggataactgcacctaactaaacggaagcattctcagaaactgctttgtgatggttgcattcacctcacagagttgaacattcctattgatagagcagtttggaaacactcttgttgtggaatgtgcaagtggagatttggagcgctttgaggcctatggtagtaaagggaatagcttcatagaaaaactagacagatgcattctcaggaaccttttggtgatgtttgtattcaactcccagagttgaactttcctttggaaagagcagctatgaaacactctttttctagaatctgcaagtggacgtttggagggctttgtggtttgtggtggaaaaggaaatatcttcacctaaatactagatagaagcattctcagaagcttctctgtgatgactgcattcaactcacggagttgaacactccttttgagagcgcagttttgaaactctctttctgtggcatctgcaaggggacatgtagacctctttgaagatttcgttggaaacggaatcatcttcacataaaaactatacagaagcagtctcagaatcttctttgtgatgtttgcattcaaatcccagagttgaactttcctttcaaagttcacgtttgaaacactctttttgcaggatctacaagtggatatttggaccactctgtgtccttcgttcgaaacgggtatatcttcacacgacatctagacagaagctttctcagaaaattctttgggatgattgagtggaactcacagagctgaacattccttgcgatggagcagtttagaaacacactttctgcagaatctgcaagtgcatatttggacctctctgaggaattcgttggaaacgggataatttcagctgactaaacagaagcattctcagaaccttcttcgtgatgtctgcattcaactcacagtgtggaaccttactttgatagttcaggtttgaaacactctttttgtagaaactgcaaggggataattgcacttctttgaggcctaccgtagtaaaggaaataacttcctatagaaagaagacagaagcattctcagaaccctcttcgtgatatttgcattcaactcacagtgctgaacctttctttgatagttcagctttgaaacactcttcttgtagaaactgcaagtggatatttggtcctctctgaggatttcgttggaaacgggataaaccgcacagaactaaacagaagaattctcagagccctcttcgtgatgtttgcattcaactcacagtgctgaacctttctttgatagtgcagctttgaaacactctttttgtagaaactgcaagtggatatttggtcctctctgaggatttcgttggaaacgggataagccgcacagaactaaaacagaagcattgtcagaaacttctttgtgatgattgcattcaactcacagagttgaaggttccttttcaaacagcagtttccaatcactctttctgtggaatctgcaagtggatatttgggcctctctgaggatttcgttggaaacgggataaaacgcacagaactaaaacagaagcattctcagaaacttctctgtgatgtttgtgttcaactcccagagtttcacgttgcttttcatagagtagttctgaaacatgcttttcgtagtgtctgcaagtggacatttggagcgctttcaggcctgtggtggaaaacgaattatggtcacataaaaactggagagaagccttctcagaaacttctctgtgatgattgcattcaactcacagagttgaaccctcctatggatagagcagtgttgaaactctctttttgtggaacctgcaagtggatatgtggacctctccgaagatgtctttggaaacgggaatatcttcacataaaaactaaacagaagcattctcagaaacttcttggtgatgtttgcattcaaatcccagagttgaaccttcctttgatagttcaggtttgaaacactctttctgtaggatctgcaagtggctatttggaccactctgtggccttcgttcgaaacgggtatatcttcgcataaaatctagacagaagcattctcagaaaatactttgtgatgattgagtttaaatcacagagctgaccattcctttggatggagcaggtttgagacacactttttgtagaatctacaagtggatatttggacctctctgaggatttcgttggaaacgggataactgcacctaactaaacggaagcattctcagaaactgctttgtgatgattgcattcacctcacagagttgaacattcctattgatagagcagtttggaaacactcttgttgtggaatgtgcaagtggagatttggagcgctttgaggcctgtggtagtaaagggaatagcttcatagaaaaactagacagatgcattctcaggaaccttttcgtgatgtttgtattcaactcccagagttgaactttcctttggaaagagcagctatgaaacactctttttctagaatctgcaagtggacgtttggagggctttgtggtttgtggtggaaaaggaaatatcttcacctaaatactagatagaagcattctcagaagcttctctgtgatgactgcattcaactcacggagttgaacactccttttgagagcgcagttttgaaactctctttctgtggcatccgcaaggggacatgtggacctctttgaagatttcgttggaaacggaatcatcttcacataaaaactatacagaagcagtctcagaatcttgtttgtgatgtttgcattcaaatcccagagttgaactttcctttcaaagttcacgtttgaaacactctttttgcaggatctacaagtggatatttggaccactctgtgtccttcgttcgaaacgggtatatcttcacaggacatctagacagaagctttctcagaaaattctttgggatgattgagttgaactcacggagctgaacattccttgcgatgtagcagtttagaaacacactttctgcagaatctgcaagtgcatatttggacctctctgaggaattcgttggaaacgggataatttcagctgactaaacagaagcattctcagaaccttcttcgtgatgtctgcattcaactcacagtgtggaacctttctttgatagttcaggtttgaaacactctttttgtagaaactgcaaggggataattgcacttctttgaggcctaccgtagtaaaggaaataacttcctataaaaagaagacagaagcattctcagaaccttcttcgtgatgtttgcattcaactcacagtgttgaacctttctttcacagttcagctttgaaacactctttttgtagaaactgcaagtggatatttggttctctctgaggatttcgttggaaacgggataaactgcacagaactaaacagaagcattctcagaaccctcttcgtgatgtttgcattcaacacacagtgctgaacctttctttgatagttcagctttgaaacactcttcttgtagaaactgcaagtggatatttggtcctctctgaggatttcgttggaaacgggataaaccgcacagaactaaaacagaagcattctcagaaccttcttcgtgatgtttgcattcaactcacagtgttgaacctttctttgatagttcaggtttgaaacggtctttctgtagaaactgcaagtagatatttggacctctctgaggatttcgttggaaacgggataacccgcacagaactaaaacagaagcattcacagaaaactcttggtgacgactgagtttaactcacagagctgaacattcctttggatggagcagtttcgaaacacactatttgtagaatgtgcaagtggatatttaggcctctctgaggatttcgttggaaacgggataaaccgcacagaactaaacagaagcattctcagaaactactttgtgatgattgcattcaagtcacagagttgaacattccctttgacagagcagtttggaaactctctttgtgtagaatctgcaagtggagatatggaccgctttgaggcctatggtagtaaaggaaatagcttcatataaaagctagacagtagcattctcagaaacttctttgtgatgcttgcattcaactcacagagttgaactttcctttcgagagagaagctttgaaacactctttttccagaatctgcaagtggacatttggagggctttgaggcctgtggtggaaaaggaattatcttcccgtaaaagctagatagaagcattgtcagaaacttctttgtgatgattgcattcaactcacagagttgaaggttccttttcaaacagcagtttccaatcactctttctgtggaatctgcaggtggatatttcgacctctttgaagatttcgttggaaacgggagaatcttcacagaaaagctaaacagaagcattctcagaaacttctctgtgatgtttgtgttcaactcccagagtttcaccgttgcttttcatagagtagttctgaaacatgcttttcgtagtgtctgcaagtggacatttggagcgctttcaggcctgtggtggaaaacgaattatggtcacataaaaactggagagaagccttctcagaaacttctctgtgatgattgcattcaactcacagagttgaaccctcctatggatagagcagtgttgaaactctctttttgtggaacctgcaagtggatatgtggacctctccgaagatgtctttggaaacgggaatatcttcacataaaaactaaacagaagcattctcagaaacttcttggtgatgtttgcattcaaatcccagagttgaaccttcctttgatagttcaggtttgaaacactctttctgtaggatctgcaagtggctatttggaccactctgtggccttcgttcgaaacgggtatatcttcgcataaaatctagacagaagcattctcagaaaatactttgtgatgattgagtttaaatcacagagctgaccattcctttggatggagcaggtttgagacacactttttgtagaatctacaagtggatatttggacctctctgaggatttcgttggaaacgggataactgcacctaactaaacggaagcattctcagaaactgctttgtgatgattgcattcacctcacagagttgaacattcctattgatagagcagtttggaaacactcttgttgtggaatgtgcaagtggagatttggagcgctttgaggcctatggtagtaaagggaatagcttcatagaaaaactagacagatgcattctcaggaactttttggtgatgtttgtattcaactcccagagttgaactttcctttggaaagagcagctatgaaacactctttttctagaatctgcaagtggacgtttggagggctttgtggtttgtggtggaaaaggaaatatcttcacctaaatactagatagaagcattctcagaagcttctctgtgatgactgcattcaactcacggagttgaacactccttttgagagcgcagttttgaaactctctttctgtggcatctgcaaggggacatgtagaactctttgaagatttcgttggaaacggaatcatcttcacataaaaactatacagaagcagtctcagaatcttctttgtgatgtttgcattcaaatcccagagttgaactttcctttcaaagttcacgtttgaaacactctttttgcaggatctacaagtggatatttggaccactctgtgtccttcgttcgaaacgggtatatcttcacatgacatctagacagaagctttctcagaaaattctttgggttgattgagttgaactcacagagctgaacattccttgcgatgtagcagtttagaaacacactttctgcagaatctgcaagtgcatatttggacctctctgaggaattcgttggaaacgggataatttcagctgactaaacagaagcattctcagaaccttcttcgtgatgtctgcattcaactcacagtgtggaacctttctttgatagttcaggtttgaaacactctttttgtagaaactgcaaggggataattgcacttctttgaggcctaccgtagtaaaggaaataacttcctatagaaagaagacagaagcattctcagaaccctcttcgtgatgtttgcattcaactcacagtgctgaacctttctttgatagttcagctttgaaacactcttcttgtagaaactgcaagtggatatttggtcctctctgaggatttcgttggaaacgggataaaccgcacagaactaaacagaagcattctcagaaccttcttcgtgatgtttgcattcaactcacagtgttgaacctttctgtgatagttcaggttggaaacggtctttctgtagaaactgcaagtagatatttggacctctctgaggatttcgttggaaacgggataaaccgcacagaactaaaacagaagcattcacagaaaactcttggtgatgactgagtttaactcacagagctgaacattcctttggatggagcagtttcgaaacacactatttgtagaatgtgcaagtggatatttgggcctctctgaggatttcgttggaaacgggataaaccgcacagaactaaacagaagcattctcagaaactactttgtgatgattgcattcaagtcacagagtttaacattccctttgacagagcagtttggaaactctctttgtgtagaatctgcaagtggagatatggaccgctttgaggcctatggtagtaaaggaaatagcttcatataaaagctagacagtagcattctcagaaacttctttgtgatgcttgcattcaactcacagagttgaactttcctttcgagagagaagctttgaaacactctttttccagaatctgcaagtgtagatttggagggctttgaggcctgtggtggaaaaggaattatcttcccgtaaaagctagatggaagcattgtcagaaacttctttgtgatgattgcattcaactcacagagttgaaggttccttttcaaacagcagtttccaatcactctttctgtggaatctgcaagtggatatttgggcctctctgaggatttcgttggaaacgggataaaacgcacagaactaaaacagaagcattctcagaaacttctctgtgatgtttgtgttcaactcccagagtttcacgttgcttttcatagagtagttctgaaacatgcttttcgtagtgtctgcaagtggacatttggagcgctttcaggcctgtggtggaaaacgaattatggtcacataaaaactggagagaagccttctcagaaacttctctgtgatgattgcattcaactcacagagttgaaccctcctatggatagagcagtgttgaaactctctttttgtggaatctgcaagtggatatgtggacctctccgaagatgtctttggaaacgggaatatcttcacataaaaactaaacagaagcattctcagaaacttcttggtgatgtttgcattcaaatcccagagttgaaccttcctttgatagttcaggtttgaaacactctttttgtaggatctgcaagtggctatttggaccactctgtggccttcgttcgaaacgggtatatcttcgcataaaatctagacagaagcattctcagaaaatactttgtgatgattgagtttaaatcacagagctgaccattcctttggatggagcaggtttgagacacactttttgtagaatctacaagtggatatttggacctctctgaggatttcgttggaaacgggataactgcacctaactaaacggaagcattctcagaaactgctttgtgatgattgcattcacctcacagagttgaacattcctattgatagagcagtttggaaacactcttgttgtggaatgtgcaagtggagatttggagcgctttgaggcctatggtagtaaagggaatagcttcatagaaaaactagacagatgcattctcaggaactttttggtgatgtttgtattcaactcccagagttgaactttcctttggaaagagcagctatgaaacactctttttctagaatctgcaagtggacgtttggagggctttgtggtttgtggtggaaaaggaaatatcttcacctaaatactagatagaagcattctcagaagcttctctgtgatgactgcattcaactcacggagttgaacactccttttgagagcgcagttttgaaactctctttctgtggcatctgcaaggggacatgtagacctctttgaagatttcgttggaaacggaatcatcttcacataaaaactatacagaagcagtctcagaatcttctttgtgatgtttgcattcaaatcccagagttgaactttcctttcaaagttcacgtttgaaacactctttttgcaggatctacaagtggatatttggaccactctgtgtccttcgttcgaaacgggtatatcttcacatgacatctagacagaagctttctcagaaaattctttgggatgattgagttgaactcacagagctgaacattccttgcgatggagcagtttagaaacacactttctgcagaatctgcaagtgcatatttggacctctctgaggaattcgttggaaacgcgataatttcagctgactaaacagaagcattctcagaaccttcttcgtgatgtctgcattcaactcacagtgtggaacctttctttgatagttcaggtttgaaacactctttttgtagaaactgcaaggggataattgcacttctttgaggcctaccgtagtaaaggaaataacttcctatagaaagaagacagaagcattctcagaaccctcttcgtgatgtttgcattcaactcacagtgctgaacctttctttgatagttcagctttgaaacactcttcttgtagaaactgcaagtggatatttggtcctctctgaggatttcgttggaaacgggataaaccgcacagaactaaacagaagaattctcagagccctcttcgtgatgtttgcattcaactcacagtgctgaacctttctttgatagtgcagctttgaaacactctttttgtagaaactgcaagtggatgtttggtcctctctgaggatttcgttggaaacgggataaaccgcacagaactaaaacagaagcattgtcagaaacttctttgtgatgattgcattcaactcacagagttgaaggttccttttcaaacagcagtttccaatcactctttctgtggaatctgcaagtggatatttgggcctctctgaggatttcgttggaaacgggataaaacgcacagaactaaaacagaagcattctcagaaacttctctgtgatgtttgtgttcaactcccagagtttcacgttgcttttcatagagtacttctgaaacatgcttttcgtagtgtctgcaagtggacatttggagcgctttcaggcctgtggtggaaaacgaattatggtcacataaaaactggagagaagccttctcagaaacttctctgtgatgattgcattcaactcacagagttgaaccctcctatggatagagcagtgttgaaactctctttttgtggaatctgcaagtggatatgtggacctctccgaagatgtctttggaaacgggaatatcttcacataaaaacttaacagaagcattctcagaaacttcttggtgatgtttgcattcaaatcccagagttgaaccttcctttgatagttcaggtttgaaacactctttctgtaggatctgcaagtggctatttggaccactctgtggccttcgttcgaaacgggtatatcttcgcataaaatctagacagaagcattctcagaaaatactttgtgatgattgagtttaaatcacagagctgaccattcctttggatggagcaggtttgagacacactttttgtagaatctacaagtggatatttggacctctctgaggatttcgttggaaacaggataactgcacctaactaaacggaagcattctcagaaactgctttgtgatgattgcattcacctcaccagagttgaacattcctattgatagagcagtttggaaacactcttgttgtggaatgtgcaagtggagatttggagcgctttgaggcctatggtagtaaagggaatagcttcatagaaaaactagacagatgcattctcaggaactttttggtgatgtttgtattcaactcccagagttgaactttcctttggaaagagcagctatgaaacactctttttctagaatctgcaagtggacgtttggagggctttgtggtttgtggtggaaaaggaaatatcttcacctaaatactagatagaagcattctcagaagcttctctgtgatgactgcattcaactcacggagttgaacactccttttgagagcgcagttttgaaactccctttctgtggcatctgcaaggggacatgtagacctctttgaagatttcgttggaaacggaatcatcttcacataaaaactatacagaagcagtctcagaatcttctttgtgatgtttgcattcaaatcccagagttgaactttcctttcaaagttcacgtttgaaacactctttttgcaggatctacaagtggatatttggaccactctgtgtccttccttcgaaacgggtatatcttcacatgacatctagacagaagctttctcagaaaattctttggaatgattgagtggaactcacagagctgaacatcccttgcgatgtagcagtttagaaacacactttctgcagaatctgcaagtgcatatttggacctctctgaggaattcgttggaaacgggataatttcagctgactaaacagaagcattctcagaaccttcttcgtgatgtctgcattcaactcacagtgtggaacctttctttgatagttcaggtttgaaacactctttttgtagaaactgcaaggggataattgcacttctttgaggcctaccgtagtaaaggaaataacttcctatagaaagaagacagaagcattctcagaaccctcttcgtgatgtttgcattcaactcacagtgctgaacctttctttgatagttcagctttgaaacactcttcttgtagaaactgtaagtggatatttgctcctctctgaggatttcgttgtagacgtgatacaccgcacagaactaaacagaagcattctcagaaccttcttcgtgatgtttgcattcaactcacagtgttgaacctttctttgatagttcaggttggaaacggtctttctgtagaaactgcaagtagatatttggacctctctgaggatttcgttggaaacgggataaaccgcacagaactaaaacagaagcattcacagaaaactcttggtgacgactgagtttaactcacagagctgaacattcctttggatggagcagtttcgaaacacactatttgtacaatgtgcaagtggatatttgggcctctctgaggatttcgttggaaacaggataaaccgcacagaactaaacagaagcattctcagaaactactttgtgatgattgcattcaagtcacagagttgaacattccctttgacagagcagtttggaaactctctttgtgtagaatctgcaagtggagatatggaccgctttgaggcctatggtagtaaaggaaatagcttcatataaaagctagacagtagcattctcagaaacttctttgtgatgcttgcattcaactcacagagttgaactttcctttcgagagagaagctttgaaacactctttttccagaatctgcaagtggacatttggagggctttgaggcctgtggtggaaaaggaattatcttcccgtaaaagctagatagaagcattgtcagaaacttctttgtgatgattgcattcaactcacagagttgaaggttccttttcaaagagcagtttccaatcactctttctgtggaatctgcaagtggatatttggacctattttgaagatttcgttggaaacgggagaatcttcacaggaaagctaaacagaagcattctcagaaacttctctgtgatgtttgtgttcaactcccagagtttcacattgcttttcatagagtagttctgaaacatgcttttcgtagtgtctacaagtggacatttggagcgctttcaggcctgtggtggaaaacgaattatggtcacataaaaactggagagaagccttctcagaaacttctctgtgatgattgcattcaactcacagagttgaaccctcctatggatagagcagtgttgaaactctctttttgtggaatctgcaagtggatatgtggacctctccgaagatgtctttggaaacgggaatatcttcacataaaaactaaacagaagcattctcagaaacttcttggtgatgtttgcattcaaatcccagagttgaaccttcctttgatagttcaggtttgaaacactctttttgtaggatctgcaagtggatatttggaccactctgtggccttcgttcgaaacgggtatatcttcgcataaaatctagacagaagcattctcagaaaatactttgtgatgattgagttgaactcacagagctgaacattcctttggatggagcaggtttgagacacactttttgtagaatctacaagtggatatttggacctctctgaggatttcgttggaaacgggataactgcacctaactaaacggaagaattctcagaaactgctttgtgatgattgcattcacctcacagagttgaacattcctattgatagagcagtttggaaacactcttcttgtggaatgtgcaagtggtgatttggagtgctttgaggcctatggtagtaaagggaatagcttcatagaaaaactagacagatgcattctcaggaactttttggtgatgtttgtattcaactcccagagttgaactttcctttggaaagagcagctatgaaacactctttttctagaatctgcaagtggacgtttggagggctttgtggtttgtggtggaaaaggaaatatcttcacctaaatactagatagaagcattctcagaagcttctctgtgatgactgcattcaactcacggagtctgaacactccttttgagagcgcagttttgaaactctctttctgtggcatctgcaaggggacatgtagacctctttgaagatttcgttggaaacggaatcatcttcacataaaaactatacagaagcagtctcagaatcttctttgtgatgtttgcattcaaatcccagagttgaactttcctctcaaagttcacgtttgaaacactctttttgcaggatctacaagtggatatttggaccactctgtgtccttcgttcgaaacgggtatatcttcacacgacatctagacagaagctttctcagaaaattctttgggatgattgagttgaactcacagagctgagcattccttgcgatgtagcagtttagaaacacactttctgcagaatctgcaagtgcatatttggacctctgtgaggaattcgttggaaacgggataatttcagctgactaaacagaagcattctcagaaccttcttcgtgatgtctgcattcaactcacagtgtggaacctttctttgatagttcaggtttgaaacactctttttgtagaaactgcaaggggataattgcactctttgaggagtacccgtagtaaaggaaataacttcctataaaaagaagacagaagaattctcagagccctcttcgtgatgtttgcattcaactcacagtgctgaacctttctttgatagtgcagctttgaaacactctttttgtagaaactgcaagtggatgtttggtcctctctgaggatttcgttggaaacgggataaaccgcacagaactaaaacagaagcattgtcagaaacttctttgtgatgattgcattcaactcacagagttgaaggttccttttcaaacagcagtttccaatcactctttctgtggaatctgcaagtggatatttgggcctctctgaggatttcgttggaaacgggataaaacgcacagaaataaaacagaagcattctcagaaacttctctgtgatgtttgtgttcaactcccagagtttcacgttgcttttcatagagtagttctgaagcatgcttttcgtagtgtctgcaagtggacatttggagcgctttcaggcctgtggtggaaaacgaattatggtcacataaaaactggagagaagccttctcagaaacttctctgtgatgattgcattcaactcacagagttgaaccctcctatggatagagcagtgttgaaactctctttttgtggaatctgcaagtggatatgtggacctctccgaagatgtctttggaaacgggaatatcttcacataaaaactaaacagaagcattctcagaaacttcttggtgatgtttgcattcaaatcccagagttgaaccttcctttgatagttcaggtttgaaacactctttttgtaggatctgcaagtggctatttggaccactctgtggccttcgttcgaaacgggtatatcttcgcataaaatctagacagaaagcattctcagaaaatactttgtgatgattgagttgaactcacagagctgaacattcctttggatggagcaggtttgagacacactttttgtagaatctacaagtggatatttggacctctctgaggatttcgttggaaacgggataactgcacctaactaaacggaagcattctcagaaactgctttgtgatgattgcattcacctcacagagttgaacattcctattgatagagcagtttggaaacactcttgttgtggaatgtgcaagtggagatttggagcgctttgaggcctatggtagtaaagggaatagcttcatagaaaaactagacagatgcattctcaggaactttttggtgatgtttgtattcaactcccagagttgaactttcctttggaaagagcagctatgaaacactctttttctagaatctgcaagtggacgtttggagggctatgtggtttgtggtggaaaaggaaatatcttcacctaaatactagatagaagcattctcagaagcttctctgtgatgactgcattcaactcacggagttgaacactccttttgagagcgcagttttgaaactctctttctgtggcatctgcaaggggacatgtagacctctttgaagatttcgttggaaacggaatcatcttcacatcaaaactatacagaagcagtctcagaatcttctttgtgatgtttgcattcaaatcccagagttgaactttcctttccaagttcacgtttgaaacactctttttgcaggatctgcaagtggatatttggaccactctgtgtccttcgttcgaaacgggtatatcttcacatgacatctagacagaagctttctcagaaaattctttgggatgattgagttgagcaaacagagctgaacactccttgcgatgtagcagtttagaaacacactttctgcagaatctgcaagtgcatatgtggacctctctgaggaattcgttggaaacgggataatttcagctgactaaacagaagcattctcagaaccttcttcatgatgtctgcattcaactcacagtgtggaacctttctttgatagttcaggtttgaaacactctttttgtagaaactgcaaggggatcattgcacttctttgaggcctaccgtagtaaaggagataacttcctataaaaagaagacagaagcattctcagaacactcttcgtgatgtttgcattcaactcacggtgctgaacctttctttgatagttcagctttgaaacactctttttgtagaaactgcaagtggatatttggtcctctctgaggatttcgttggaaacgggataaaccgcacagaactaaacagaagcattctcagaaccttcttcgtgatgtttgcattcaactcacagtgttgaacctttctttgatagttcaggtttgaaacggtctttctgtagaaactgcaagtagatatttagacctctctgaggatttcgttggaaacgggataaacagcacagaactaaaacagaagcattcacagaaaactcttggtgacgactgagtttaactcacagagctgaacattcctttggatggagcagtttcgaaacacactatttgtagaatgtgcaagtggatatttaggcctctctgaggatttcgttggaaacgggataaaccgcacagaactaaacagaagcattctcagaaactactttgtgatgattgcattcaagtcacagagttgaacattccctttgacagagcagtttggaaactctctttgtgtagaatctgcaagtggagatatggaccgctttgaggcctatggtagtaaaggaaatagcttcatataaaagctagacagtagcattctcagaaacttctttgtgatgcttgcattcaactcacagagttgaactttcctttcgagagagaagctttgaaacactctttttccagaatctgcaagtggacatttggagggctttgaggcctgtggtggaaaaggaattatcttcccgtaaaagctagatagaagcattgtcagaaacttctttgtgatgattgcattcaagtcacagagttgaaggttccttttcaaagagcagtttccaatcactctttctgtggaatctgcaagtggatatttggacctctttgaagatttcgttggaaacgggagaatcttcacagaaaagctaaacagaagcattctcagaaacttctctgtgatgtttgtgttcaactcccagagtttcacgttgcttctcatagagtagttctgaaacatgcttttcgtagtgtctgcaagtggacatttggagcgctttcaggcctgtggtggaaaacgaattatggtcacataaaaactggagagaagccttctcagaaacttctctgtgatgattgcattcaactcacagagttgaaccctcctatggatagagcagtgttgaaactctctttttgtggaatctgcaagtggatatgtggacctctccgaagatgtctttggaaacgggaatatcttcacataaaaactaaacagaagcattctcagaaacttcttggtgatgtttgcattcaaatcccagagttgaaccttcctttgagagttcaggtttgaaacactctttttgtaggatctgcaagtggatatttggaccactctgtggccttcgttcgaaacgggtacatcttcgcataaaatctagacagaagcattctcagaaaatactttgtgatgattgagttgaactcacagagctgaacattcctttggatggagcaggtttgagacacacttcttgtagaatctacaagtggatatttggacctctctgaggatttcgttgggaacgggataactgcacctaactaaacggaagcattctcagaaactgctttgtgatgattgcattcacctcacagagttgaacatttctattgatagagcagtttggaaacactcttgttgtggaatgtgcaagtggagatttggagcgctttgaggcctatggtattagagggaatagcttcatagaaaaactagacagatgcattctcaggaactttttggtgatgtttgtattcaactcccagagttgaactttcctttggaaagagcagctatgaaacactctttttctagaatctgcaagtggacgtttggagggctttgtggtttgtggtggaaaaggaaatatcttcacctaaatactagatagaagcattctcagaagcttctctgtgatgactgcattcaactcacggagttgaacactccttttgagagcgcagttttgaaactctctttctgtggcatctgcaaggggacatgtagacctctttgaagatttcgttggaaacggaatcatcttcacataaaaactatacagaagcagtctcagaatcttctttgtgatgtttgcattcaaatcccagagttgaactttcctttcaaagttcacgtttgaaacactctttttgcaggatctacaagtggatatttggaccactctgtgtccttcgttcgaaacgggtatatcttcacacgacatctagacagaagctttctcagaaaattctttgggatgattgagtggaactcacagagctgaacattccttgcgatgtagcagtttagaaacacactttctgcagaatctgcaagtgcatatttggacctctctgaggaattcgttggaaacgggataatttcagctgactaaacagaagcattctcagaaccttcttcgtgatgtctgcattcaactcacagtgtggaacctttctttgatagttcaggtttgaaacactctttttgtagaaactgcaaggggataattgcacttctttgaggcctaccgtagtaaaggaaataacttcctatagaaagaagacagaagcattctcagaaccctcttcgtgatgtttgcattcaactcacagtgctgaacctttctttgatagttcagctttgaaacactcttcttgtagaaactgcaagtggatatttggtcctctctgaggatttcgttggaaacgggataaaccgcacagaactaaacagaagaattctcagagccctcttcgtgatgtttgcattcaactcacagtgctgaacctttctttgatagtgcagctttgaaacactctttttgtagaaactgcaagtggatgtttggtcctctctgaggatttcgttggaaacgggataaaccgcacagaactaaaacagaagcattgtcagaaacttctttgtgatgattgcattcaactcacagagttgaaggttccttttcaaacagcagtttccaatcactctttctgtggaatctgcaagtggatatttgggcctctctgaggatttcgttggaaacgggataaaacgcacagaactaaaacagaagcattctcagaaacttctctgtgatgtttgtgttcaactcccagagtttcacgttgcttttcatagagtagttctgaaacatgcttttcgtagtgtctgcaagtggacatttggagcgctttcaggcctgtggtggaaaacgaattatggtcacataaaaactggagagaagccttctcagaaacttctctgtgatgattgcattcaactcacagagttgaaccctcctatggatagagcagtgttgaaactctctttttgtggaatctgcaagtggatatgtggacctctccgaagatgtctttggaaacgggaatatcttcacataaaaactaaacagaagcattctcagaaacttcttggtgatgtttgcattcaaatcccagagttgaaccttcctttgatagttcaggtttgaaacactctttctgtaggatctgcaagtggctatttggaccactctgtggccttcgttcgaaacgggtatatcttcgcataaaatctagacagaagcattctcagaaaatactttgtgatgattgagtttaaatcacagagctgaccattcctttggatggagcaggtttgagacacactttttgtagaatctacaagtggatatttggacctctctgaggatttcgttggaaacgggataactgcacctaactaaacggaagcattctcagaaactgctttgtgatgattgcattcacctcacagagttgaacattcctattgatagagcagtttggaaacactcttgttgtggaatgtgcaagtggagatttggagcgctttgaggcctatggtagtaaagggaatagcttcatagaaaaactagacagatgcattctcaggaactttttggtgatgtttgtattcaactcccagagttgaactttcctttggaaagagcagctatgaaacactctttttctagaatctgcaagtggacgtttggagggctttgtggtttgtggtggaaaaggaaatatcttcacctaaatactagatagaagcgttctcagaagcttctctgtgatgactgcattcaactcacggagttgaacactccttttgagagcgcagttttgaaactctctttctgtggcatctgcaaggggacatgtagacctctttgaagatttcgttggaaacggaatcatcttcacatcaaaactatacagaagcagtctcagaatcttctttgtgatgtttgcattcaaatcccagagttgaactttcctttcaaagttcacgtttgaaacactctttttgcaggatctacaagtggatatttggaccactctgtgtccttcgttcgaaacgggtatatcttcacatgacatctagacagaagctttctcagaaaattctttgggatgattgagtggaactcacagagctgaacattccttgcgatgtagcagtttagaaacacactttctgcagaatctgcaagtgcatatttggacctctctgaggaattcgttggaaacgggataatttcagctgactaaacagaagcattctcagaaccttcttcgtgatgtctgcattcaactcacagtgtggaacctttctttgatagttcaggtttgaaacactctttttgtagaaactgcaaggggataattgcacttctttgaggcctaccgtagtaaaggaaataacttcctatagaaagaagacagaagcattctcagaaccctcttcgtgatgtttgcattcaactcacagtgctgaacctttctttgatagttcagctttgaaacactcttcttgtagaaactgcaagtggatatttggtcctctctgaggatttcgttggaaacgggataaaccgcacagaactaaacagaagaattctcagagccctcttcgtgatgtttgcattcaactcacagtgctgaacctttctttgatagtgcagctttgaaacactctttttgtagaaactgcaagtggatgtttggtcctctctgaggatttcgttggaaacgggataaaccgcacagaactaaaacagaagcattgtcagaaacttctttgtgatgattgcattcaactcacagagttgaaggttccttttcaaacagcagtttccaatcactctttctgtggaatctgcaagtggatatttgggcctctctgaggatttcgttggaaacgggataaaacgcacagaactaaaacagaagcattctcagaaacttctctgtgatgtttgtgttcaactcccagagtttcacgttgcttttcatagagtagttctgaaacatgcttttcgtagtgtctgcaagtggacatttggagcgctttcaggcctgtggtggaaaacgaattatggtcacataaaaactggagagaagccttctcagaaacttctctgtgatgattgcattcaactcacagagttgaaccctcctatggatagagcagtgttgaaactctctttttgtggaatctgcaagtggatatgtggacctctccgaagatgtctttggaaacgggaatatcttcacataaaaactaaacagaagcattctcagaaacttcttggtgatgtttgcattcaaatcccagagttgaaccttcctttgatagttcaggtttgaaacactctttctgtaggatctgcaagtggctatttggaccactctgtggccttcgttcgaaacgggtatatcttcgcataaaatctagacagaagcattctcagaaaatactttgtgatgattgagtttaaatcacagagctgaccattcctttggatggagcaggtttgagacacactttttgtagaatctacaagtggatatttggacctctctgaggatttcgttggaaacgggataactgcacctaactaaacggaagcattctcagaaactgctttgtgatggttgcattcacctcacagagttgaacattcctattgatagagcagtttggaaacactcttgttgtggaatgtgcaagtggagatttggagcgctttgaggcctatggtagtaaagggaatagcttcatagaaaaactagacagatgcattctcaggaactttttggtgatgtttgtattcaactcccagagttgaactttcctttggaaagagcagctatgaaacactctttttctagaatctgcaagtggacgtttggagggctttgtggtttgtggtggaaaaggaaatatcttcacctaaatactagatagaagcattctcagaagcttctctgtgatgactgcattcaactcacggagttgaacactccttttgagagcgcagttttgaaactctctttctgtggcatctgcaaggggacatgtagacctctttgaagatttcgttggaaacggaatcatcttcacataaaaactatacagaagcagtctcagaatcttctttgtgatgtttgcattcaaatcccagagttgaactttcctttcaaagttcacgtttgaaacactctttttgcaggatctacaagtggatatttggaccactctgtgtccttcgttcgaaacgggtatatcttcacacgacatctagacagaagctttctcagaaaattctttgggatgattgagtggaactcacagagctgaacattccttgcgatggagcagtttagaaacacactttctgcagaatctgcaagtgcatatttggacctctctgaggaattcgttggaaacgggataatttcagctgactaaacagaagcattctcagaaccttcttcgtgatgtctgcattcaactcacagtgtggaacctttctttgatagttcaggtttgaaacactctttttgtagaaactgcaaggggataattgcacttctttgaggcctaccgtagtaaaggaaataacttcctatagaaagaagacagaagcattctcagaaccctcttcgtgatgtttgcattcaactcacagtgctgaacctttctttgatagttcagctttgaaacactcttcttgtagaaactgcaagtggatatttggtcctctctgaggatttcgttggaaacgggataaaccgcacagaactaaacagaagaattctcagagccctcttcgtgatgtttgcattcaactcacagtgctgaacctttctttgatagtgcagctttgaaacactctttttgtagaaactgcaagtggatgtttggtcctctctgaggatttcgttggaaacgggataaaccgcacagaactaaaacagaagcattgtcagaaacttctttgtgatgattgcattcaactcacagagttgaaggttccttttcaaacagcagtttccaatcactctttctgtggaatctgcaagtggatatttgggcctctctgaggatttcgttggaaacgggataaaacgcacagaactaaaacagaagcattctcagaaacttctctgtgatgtttgtgttcaactcccagagtttcacgttgcttttcatagagtagttctgaaacatgcttttcgtagtgtctgcaagtggacatttggagcgctttcaggcctgtggtggaaaacgaattatggtcacataaaaactggagagaagccttctcagaaacttctctgtgatgattgcattcaactcacagagttgaaccctcctatggatagagcagtgttgaaactctctttttgtggaatctgcaagtggatatgtggacctctccgaagatgtctttggaaacgggaatatcttcacataaaaactaaacagaagcattctcagaaacttcttggtgatgtttgcattcaaatcccagagttgaaccttcctttgatagttcaggtttgaaacactctttttgtaggatctgcaagtggatatttggaccactctgtggccttcgttcgaaacgggtatatcttcgcataaaatctagacagaagcattctcagaaaatactttgtgatgattgagtttaactcacagagctgaacattcctttggatggagcaggtttgagacacaccttttgtagaatctacaagtggatatttggacctctctgaggatttcgttggaaacgggataactgcacctaactaaacggaagcattctcagaaactgctttgtgatgattgcattcacctcacagagttgaacattcctattgatagagcagtttggaaacactcttgttgtggaatgtgcaagtggagatttggagcgctttgaggcctatggtagtaaagggaatagcttcatagaaaaactagacagatgcattctcaggaactttttggtgatgtttgtattcaactcccagagttgaactttcctttggaaagagcagctatgaaacactgtttttctagaatctgcaagtggacgtttggagggctttgtggtttgtggtggaaaaggaaatatcttcacctaaatactagatagaagcattctcagaagcttctctgtgatgactgcattcaactcacggagttgaacactccttttgagagcgcagttttgaaactctctttctgtggcatctgcaaggggacatgtagacctctttgaaaatttcgttggaaacggaatcatcttcacataaaaactacacagaagcagtctcagaatcttctttgtgatgtttgcattcaaatcccagagttgaactttcctttcaaagttcacgtttgaaacactctttttgcaggatctacaagtggatatttggaccactctgtgtccttcgttcgaaacgggtatatcttcacacgacatctagacagaagctttctcagaaaattctttgggatgattgagtggaactcacagagatgaacattccttgcgatgtagcagtttagaaacacactttctgcagaatctgcaagtgcatatttggacctctctgaggaattcgttggaaacgggataatttcagctgactaaacagaagcattctcagaaccttcttcgtgatgtctgcattcaactcacagtgtggaacctttctttgatagttcaggtttgaaacactctttttgtagaaactgcaaggggataattgcacttctttgaggcctaccgtagtaaaggaaataacttcctatagaaagaagacagaagcattctcagaaccctcttcgtgatgtttgcattcaactcacagtgctgaaactttctttgatagttcagctttgaaacactcttcttgtagaaactgcaagtggatatttggtcctctctgaggatttcgttggaaaagggataaaccgcacagaactaaacagaagcattctcagagccctcttcgtgatgtttgcattcaactcacagtgctgaacctttctttgatagtgcagctttgaaacactctttttgtagaaactgcaagtggatatttggtcctctctgaggatttcgttggaaacgggataaaccgcacagaactaaaacagaagcattcacagaaaactcttggtgacgactgagtttaactcacagagctgaacattcctttggatggagcagtttcgaaacacactatttgtagaatgtgcaagtggatatgtgggcctctctgaggatttcgttggaaacgggataaaccacacagaactaaacagaaagcattctcagaaactattttgtgatgattgcattcaagtcacagagttgaacattccctttgacagagcagtttggaaactctctttgtgtagaatctgcaagtggagatatggaccgctttgaggcctatggtagtaaaggaaatagcttcatataaaagctagacagagcattctcagaaacttctttgtgatgcttgtattcaactcacagagttgaactttcctttcgagagagaagctttgaaacactctttttccagaatctgcaagtggacatttggagggctttgaggcctgtggtggaaaaggaattatcttcccgtaaaagctagatagaagcatagtcagaagcttctttgtgatgattgcattcaactcacagagttgaaggttccttttcaaacagcagtttccaatcactctttctgtggaatctgcaagtgtatatttggacctattttgaagatttcgttggaaacgggataatcttcacagaaaagctaaacagaagcattctcagaaacttctctgtgatgtttgtgttcaactcccagagtttcacattgcttttcatagagtagttctgaaacatgcctttcgtagtgtctgcaagtggacatttggagagatttcaggcctgtggtggaaaacgaattatggtcacataaaaactggagagaagccttctcagaaacttctctgtgatgattgcattcaactcacagagttgaaccctcctatggatagagcagtgttgaaactctctttttgtggaatctgcaagtggatatgtggacctctccgaagatgtctttggaaacgggaatatcttcacataaaaactaaacagaagcattctcagaaacttcttggtgatgtttgcattcaaatcccagagttgaaccttcctttgatagttcaggtttgaaacactctttttgtaggatctgcaagtggatatttggaccactctgtggccttcgttcaaaacgggtacatcttcgcataaatctagacagaagcattctcagaaaatactttgtgatggttgagttgaactcacagagctgaacattcctttggatggagcaggtttgagacacactttttgtagaatctacaagtggatatttggacctctctgaggatttcgttggaaacgggataaatgcacctaactaaacggaagcattgtcagaaactgctttgtgatgattgcattcacctcacagagttgaacattcctattgatagagcagtttggaaacactcttcttgtggaatgtgcaagtggagatttggagcgctttgaggcctatggtagtaaagggaatagcttcatagaaaaactagacagatgcattctcaggaactttttggtgatgtttgtattcaactcccagagttgaactttcctttggaaagagcagctatgaaacactctttttctagaatctgcaagtggacgtttggagggctttgtggtttgtggtggaaaaggaaatatcttcacctaaatactagatagaagcattctcagaagcttctctgtgatgactgcattcaactcacggagttgaacactccttttgagagcgcagttttgaaactctctttctgtggcatctgcaaggggacatgtagacctctttgaagatttcgttggaaacggaatcatcttcgcataaaaactatacagaagcagtctcagaatcttctttgtgatgtttgcattcaaatcccagagttgaacttgcctttcaaagttcacgtttgaaacactctttttgcaggatctacaagtggatatttggaccactctgtgtccttcgttcgaaacgggtatatcttcacatgacatctagacagaagctttctcagaaaattctttgggatgattgagtggaactcacagagctgaacattccttgcgatgtagcagtttagaaacacactttctgcagaatctgcaagtgcatatttggacctctctgaggaattcgttggaaacgggataatttcagctgactaaacagaagcattctcagaaccttcttcgtgatgtctgcattcaactcacagtgtggaacctttctttgatagttcaggtttgaaacactctttttgtagaaactgcaaggggataattgcacttctttgaggcctaccgtagtaaaggaaataacttcctatagaaagaagacagaagcattctcagaaccctcttcgtgatgtttgcattcaactcacagtgctgaacctttctttgatagttcagctttgaaacactcttcttgtagaaactgcaagtggatatttggtcctctctgaggatttcgttggaaacgggataaaccgcacagaactaaacagaagaattctcagagccctcttcgtgatgtttgcattcaactcacagtgctgaacctttctttgatagtgcagctttgaaacactctttttgtagaaactgcaagtggatgtttggtcctctctgaggatttcgttggaaacgggataaaccgcacagaactaaaacagaagcattgtcagaaacttctttgtgatgattgcattcaactcacagagttgaaggttccttttcaaacagcagtttccaatcactctttctgtggaatctgcaagtggatatttgggcctctctgaggatttcgttggaaacgggataaaacgcacagaactaaaacagaagcattctcagaaacttctctgtgatgtttgtgttcaactcccagagtttcacgttgcttttcatagagtagttctgaaacatgcttttcgtagtgtctgcaagtggacatttggagcgctttcaggcctgtggtggaaaacgaattatggtcacataaaaactggagagaagccttctcagaaacttctctgtgatgattgcattcaactcacagagttgaaccctcctatggatagagcagtgttgaaactctctttttgtggaatctgcaagtggatatgtggacctctccgaagatgtctttggaaacgggaatatcttcacataaaaactaaacagaagcattctcagaaacttcttggtgatgtttgcattcaaatcccagagttgaaccttcctttgatagttcaggtttgaaacactctttttgtaggatctgcaagtggatatttggaccactctgtggccttcgttcgaaacgggtatatcttcgcataaaatctagacagaagcattctcagaaaatactttgtgatgattgagtttaactcacagagctgaacattcctttggatggagcaggtttgagacacactttttgtagaatctacaagtggatatttggacctctctgaggatttcgttggaaacgggataactgcacctaactaaacggaagcattctcagaaactgctttgtgatgattgcattcacctcacagagttgaacattcctattgatagagcagtttggaaacactcttgttgtggaatgtgcaagtggagatttggagcgctttgaggcctatggtagtaaagggaatagcttcatagaaaaactagacagatgcattctcaggaactttttggtgatgtttgtattcaactcccagagttgaactttcctttggaaagagcagctatgagacactgtttctctagaatctgcaagtggacgtttggagggctttgtggtttgtggtggaaaaggaaatatcttcacctaaatactagatagaagcattctcagaagcttctctgtgatgactgcattcaactcacggagttgaacactccttttgagagcgcagttttgaaactctctttctgtggcatctgcaaggggacatgtagacctctttgaagatttcgttggaaacggaatcatcttcacataaaaactatacagaagcagtctcagaatcttctttgtgatgtttgcattcaaatcccagagttgaactttcctttcaaagttcacgtttgaaacactctttttgcaggatctacaagtggatatttggaccactctgtgtccttcgttcgaaacgggtatatcttcacacgacatctagacagaagctttctcagaaaattctttgggatgattgagtggaactcacagagctgaacattccttgcgatgtagcagtttagaaacacactttctgcagaatctgcaagtgcatatttggacctctctgaggaattcgttggaaacgggataatttcagctgactaaacagaagcattctcagaaccttcttcgtgatgtctgcattcaactcacagtgtggaacctttctttgatagttcaggtttgaaacactctttttgtagaaactgcaaggggataattgcacttctttgaggcctaccgtagtaaaggaaataacttcctatagaaagaagacagaagcattctcagaaccctcttcgtgatgtttgcattcaactcacagtgctgaacctttctttgatagttcagctttgaaacactcttcttgtagaaactgcaagtggatatttggtcctctctgaggatttcgttggaaacgggataaaccgcacagaactaaacagaagaattctcagagccctcttcgtgatgtttgcattcaactcacagtgctgaacctttctttgatagtgcagctttgaaacactctttttgtagaaactgcaagtggatgtttggtcctctctgaggatttcgttggaaacgggataaaccgcacagaactaaaacagaagcattgtcagaaacttctttgtgatgattgcattcaactcacagagttgaaggttccttttcaaacagcagtttccaatcactctttctgtggaatctgcaagtggatatttgggcctctctgaggatttcgttggaaacgggataaaacgcacagaactaaaacagaagcattctcagaaacttctctgtgatgtttgtgttcaactcccagagtttcacgttgcttttcatagagtagttctgaaacatgcttttcgtagtgtctgcaagtggacatttggagcgctttcaggcctgtggtggaaaacgaattatggtcacataaaaactggagagaagccttctcagaaacttctctgtgatgattgcattcaactcacagagttgaaccctcctatggatagagcagtgttgaaactctctttttgtggaatctgcaagtggatatgtggacctctccgaagatgtctttggaaacgggaatatcttcacataaaaactaaacagaagcattctcagaaacttcttggtgatgtttgcattcaaatcccagagttgaaccttcctttgatagttcaggtttgaaacactctttctgtaggatctgcaagtggctatttggaccactctgtggccttcgttcgaaacgggtatatcttcgcataaaatctagacagaagcattctcagaaaatactttgtgatgattgagtttaaatcacagagctgaccattcctttggatggagcaggtttgagacacactttttgtagaatctacaagtggatatttggacctctctgaggatttcgttggaaacgggataactgcacctaactaaacggaagcattctcagaaactgctttgtgatgattgcattcacctcacagagttgaacattcctattgatagagcagtttggaaacactcttgttgtggaatgtgcaagtggagatttggagcgctttgaggcctgtggtagtaaagggaatagcttcatagaaaaactagacagatgcattctcaggaactttttggtgatgtttgtattcaactcccagagttgaactttcctttggaaagagcagctatgaaacactctttttctagaatctgcaagtggacgtttggagggctttgtggtttgtggtggaaaaggaaatatcttcacctaaatactagatagaagcattctcagaagcttctctgtgatgactgcattcaactcacggagttgaacactccttttgagagcgcagttttgaaactctctttctgtggcatctgcaaggggacatgtagacctctttgaagatttcgttggaaacggaatcatcttcacataaaaactatacagaagcagtctcagaatcttctttgtgatgtttgcattcaaatcccagagttgaactttcctttcaaagttcacgtttgaaacactctttttgcaggatctacaagtggatatttggaccactctgtgtccttcgttcgaaacgggtatatcttcacacgacatctagacagaagctttctcagaaaattctttgggatgattgagtggaactcacagagctgaacattccttgcgatgtagcagtttagaaacacactttctgcagaatctgcaagtgcatatttggacctctctgaggaattcgttggaaacgggataatttcagctgactaaacagaagcattctcagaaccttcttcgtgatgtctgcattcaactcacagtgtggaacctttctttgatagttcaggtttgaaacactctttttgtagaaactgcaaggggataattgcacttctttgaggcctaccgtagtaaaggaaataacttcctatagaaagaagacagaagcattctcagaaccctcttcgtgatgtttgcattcaactcacagtgctgaacctttctttgatagttcagctttgaaacactcttcttgtagaaactgcaagtggatatttggtcctctctgaggatttcgttggaaacgggataaaccgcacagaactaaacagaagaattctcagagccctcttcgtgatgtttgcattcaactcacagtgctgaacttttctttgatagtgcagctttgaaacactctttttgtagaaactgcaagtggatgtttggtcctctctgaggatatcgttggaaacgggataaaccgcacagaactaaaacagaagcattctcagaaccttcttcgtgatgtttgcattcaactcacagtgttgaacctttctttgatagttcaggtttgaaacggtctttctgtagaaactgcaagtagatatttggacctctctgaggatttcgttggaaacgggataacccgcacagaactaaaacagaagcattcacagaaaactcttggtgacgactgagtttaactcacagagctgaacattcctttggatggagcagtttcgaaacacactatttgtagaatgtgcaagtggatatttaggcctctctgaggatttcgttggaaacgggataaaccgcacagaactaaacagaagcattctcagaaactactttgtgatgattgcattcaagtcacagagttgaacattccctttgacagagcagtttggaaactctctttgtgtagaatctgcaagtggagatatggaccgctttgaggcctatggtagtaaaggaaatagcttcatataaaagctagacagtagcattctcagaaacttctttgtgatgcttgcattcaactcacagagttgaactttcctttcgagagagaagctttgaaacactctttttccagaatctgcaagtggacatttggagggctttgaggcctgtggtggaaaaggaattatcttcccgtaaaagctagatagaagcattgtcagaaacttctttgtgatgattgcattcaactcacagtagttgaaggttccttttcaaagagcagtttccaatcactctttctgtggaatctgcaagtggatatttggacctattttgaagatttcgttggaaacgggagaatcttcacaggaaagctaaacagaagcattctcagaaacttctctgtgatgtttgtgttcaactcccagagtttcacattgcttctcatagagtagttctgaaacatgcttttcgtagtgtctgcaagtggacatttggagcgctttcaggcctgtggtggaaaacgaattatggtcacataaaaactggagagaagccttctcagaaacttctctgggatgattgcattcaactcacagagttgaaccctcctatggatagagcagtgttgaaactctctttttgtggaatctgcaagcggatatgtggacctctctgaagatgtctttggaaacgggaatatcgtcacataaaaactaaacagaagcattctcagaaacttcttggtgatgtttgcattcaaatcccagagttgaaccttcctttgagagttcaggtttgaaacactctttttgtaggatctgcaagtggatatttggaccactctgtggccttcgtttgaaacgggtacatcttcgcataaaatctagacagaagcattctcagaaaatactttgtgatgattgagttgaactcacagagctgaacattcctttggatggagcaggtttgagacacactttttgtagaatctacaagtggatatttggacctctctgaggatttcgttggaaacgggataactgcacctaactaaacggaagcattcccagaaactgctttgtgatgattgcattcacctcacagagttgaacattcctattgatagagcagtttggaaacactcttgttgtggaatgtgcaagtggagatttggagcgctttgaggcctatggtagtaaagggaatagcttcatagaaaaactagacagatgcattctcaggaactttttggtgatgtttgtattcaactcccagagttgaactttcctttggaaagagcagctatgaaacactctttttctagaatctgcaagtggacgtttggagggctttgtggtttgtggtggaaaaggaaatatcttcacctaaatactagatagaagcattctcagaagcttctctgtgatgactgcattcaactcacggagttgaacactccttttgagagcgcagttttgaaactctctttctgtggcatctgcaaggggacatgtagacctctttgaagatttcgttggaaacggaatcatcttcacataaaaactatacagaagcagtctcagaatcttctttgtgatgtttgcattcaaatcccagagttgaactttcctttcaaagttcacgtttgaaacactctttttgcaggatctacaagtggatatttggaccactctgtgtccttcgttcgaaacgggtatatcttcacatgacatctagacagaagctttctcagaaaattctttgggatgattgagtggaactcacagagctgaacattccttgcgatggagcagtttagaaacacactttctgcagaatctgcaagtgcatatttggacctctctgaggaattcgttggaaacgggataatttcagctgactaaacagaagcattctcagaaccttcttcgtgatgtctgcattcaactcacagtgtggaacctttctttgatagttcaggtttgaaacactctttttgtagaaactgcaaggggataattgcacttctttgaggcctaccgtagtaaaggaaataacttcctatagaaagaagacagaagcattctcagaaccctcttcgtgatgtttgcattcaactcacagtgctgaacctttctttgatagttcagctttgaaacactcttcttgtagaaactgcaagtggatatttggtcctctctgaggatttcgttggaaacgggataaaccgcacagaactaaacagaagaattctcagagccctcttcgtgatgtttgcattcaactcacagtgctgaacctttctttgatagtgcagctttgaaacactctttttgtagaaactgcaagtggatgtttggtcctgctcctgaggatttcgttggaaacgggataaaccgcacagaactaaaacagaagcattgtcagaaacttctttgtgatgattgcattcaactcacagagttgaaggttccttttcaaacagcagtttccaatcactctttctgtggaatctgcaagtggatatttgggcctctctgaggatttcgttggaaacgggataaaacgcacagaactaaaacagaagcattctcagaaacttctctgtgatgtttgtgttcaactcccagagtttcacgttgcttttcatagagtagttctgaaacatgcttttcgtagtgtctgcaagtggacatttggagcgctttcaggcctgtggtggaaaacgaattatggtcacataaaaactggagagaagccttctcagaaacttctctgtgatgattgcattcaactcacagagttgaaccctcctatggatagagcagtgttgaaactctctttttgtggaatctgcaagtggatatgtggacctctccgaagatgtctttggaaacgggaatatcttcacataaaaactaaacagaagcattctcagaaatttcttggtgatgtttgcattcaaatcccagagttgaaccttcctttgatagttcaggtttgaaacactctttctgtaggatctgcaagtggctatttggaccactctgtggccttcgttcgaaacgggtatatcttcgcataaaatctagacagaagcattctcagaaaatactttgtgatgattgagtttaaatcacagagctgaccattcctttggatggagcaggtttgagacacactttttgtagaatctacaagtggatatttggacctctctgaggatttcgttggaaacgggataactgcacctaactaaacggaagcattctcagaaactgctttgtgatgattgcattcacctcacagagttgaacattcctattgatagagcagttgggaaacactgctgttgtggaatgtgcaagtggagatttggagcgctttgaggcctatggttgtaaagggaatagcttcatagaaaaactagacagatgcattctcaggaactttttggtgatgtttgtattcaactcccagagttgaactttcctttggaaagagcagctatgaaacactctttttctagaatctgcaagtggacgtttggagggctttgtggtttgtggtggaaaaggaaatatcttcacctaaatactagatagaagcattctcagaagcttctctgtgatgactgcattcaactcacggagttgaacactccttttgagagcgcagttttgaaactctctttctgtggcatctgcaaggggacatgtagacctcttggaagatttcgttggaaacggaatcatcttcacataaaaactatacagaagcagtctcagaatcttctttgtgatgtttgcattcaaatccccgagttgaactttcctttcaaagttcacgtttgaaacactctttttgcaggatctacaagtggatatttggaccactctgtgtccttcgttcgaaacgggtatatcttcacatgacatctagacagaagctttctcagaaaattctttgggatgattgagttgaactcacagagctgagcattccttgcgatgtagcagtttagaaacacactttctgcagaatctgcaagtgcatatttggacctctgtgaggaattcgttggaaacgggataatttcagctgactaaacagaagcattctcagaaccttcttcgtgatgtctgcattcaactcacagtgtggaacctttctttgatagttcaggtttgaaacactctttctgtagaaactgcaaggggataattgcactctttgaggagtaccgtagtaaaggaaataacttcctataaaaagaagacagaagcattctcagaaccctcttcgtgatgtttgcattcaactcacagtgctgaacctttctttgatagttcagctttgaaacactctttttgtagaaactgcaagtggatatttggtcctctctgagcatttcgttggaaacgggataaactgcacagaactaaacagaagcattctcagaaccttcttcgtgatgtttgcattcaactcacagtgttgaacctttctttgatagttcaggtttgaaacggtctttctgtagaaactgcaagtagatatttggacctctctgaggatttcgttggaaacgggataacccgcacagaactaaaacagaagcattcacagaaaactcttggtgacgactgagtttaactcacagagctgaacattcctttggatggagcagtttcgaaacacactatttgtagaatgtgcaagtggatatttaggcctctctgaggatttcgttggaaacgggataaaccgcacagaactaaacagaaagcattctcagaaactactttgtgatgattgcattcaagtcacagagttgaacattccctttgacagagcagtttggaaactctctttgtgtagaatctgcaagtggagatatggaccgctttgaggcctatggtagtaaaggaaatagcttcatataaaagctagacagtagcattctcagaaacttctttgtgatgcttgcattcaactcacagagttgaactttcctttcgagagagaagctttgaaacactctttttccagaatctgcaagtggacatttggagggctttgaggcctgtggtggaaaaggaattaacttcccgtaaaagctagatagaagcattgtcagaaacttctttgtgatgattgcattcaactcaaagagatgaaggttcctttacaaacagcagtttccaaacactctttctgtggaatctgcaagtggatatttggacctctttgaagatttcgttggaaacgggagaatcttcacagaaaagctaaacagaagcattctcagaaacttctctgtgatgtttgtgttcaactcccagagtttcacattgcttctcatagagtagttctgaaacatgcttttcgtagtgtctgcaagtggacatttggagcgctttcaggcctgtggtggaaaacgaattatggtcacataaaaactggagagaagccttctcagaaacttctctgtgatgattgcattcaactcacagagttgaaccctcctatggatagagcagtgttgaaactctctttttgtggaatctgcaagcggatatgtggacctctccgaagatgtctttggcaacgggattatcttcacataaaaactaaacagaaacattctcagaaacttcttggtgatgtttgcattcaaatcccagagttgaaccttcctttgagagttcaggtttgaaacactctttttgtaggatctgcaagtggatatttggaccactctgtggccttcgttcgaaacgggtacatcttcgcataaaatctagacagaagcattctcagaaaatactttgtgatgattgagtttaactcacagagctgaacattcctttggatggagcaggtttgagacacactttttgtagaatctacaagtggatatttggacctctctgaggatttcgttggaaacgggataactgcacctaactaaacggaagcattctcagaaactgctttgtgatgattgcattcacctcacagagttgaacattcctattgatagagcagtttggaaacactcttgttgtggaatgtgcaagtggagatttggagcgctttgaggcctatggtagtaaagggaatagcttcatagaaaaactagacagatgcattctcaggaactttttggtgatgtttgtattcaactcccagagttgaactttcctttggaaagagcagctatgaaacactctttttctagaatctgcaagtggacgtttggagggctttgtggtttgtggtggaaaaggaaatatcttcacctaaatactagatagaagcatcctcagaagcttctctgtgatgactgcattcaactcacggagttgaacactccttttgagagcgcagttttgaaactctctttctgtggcatctgcaaggggacatgtagacctctttgaagatttcgttggaaacggaatcatcttcacataaaaactatacagaagcagtctcagaatcttctttgtgatgtttgcattcaaatccccgagttgaactttcctttcaaagttcacgtttgaaacactctttttgcaggatctacaagtggatatttggaccactctgtgtccttcgttcgaaacgggtatatcttcacatgacatctagacagaagctttctcagaaaattctttgggatgattgagttgaactcacagagctgagcattccttgcgatgtagcagtttagaaacacactttctgcagaatctgcaagtgcatatgtggacctctctgaggaattcgttggaaacgggataatttcagctgactaaacagaagcattctcagaaccttcttcgtgatgtctgcattcaactcaaagtgtggaacctttctttgatagttcaggttttaaaaactctttttgtagaaactgcaaggggataattgcactctttgaggagtaccgtagtaaaggaaataacttcctataaaaagaagacagaagcattctcagaaccctcttcgtgatgtttgcattcaactcacagtgctgaacctttctttgatagttcagctttgaaacactcttcttgtagaaactgcaagtggatatttggtcctctctgaggatttcgttggaaacgggataaaccgcacagaactaaacagaagaactctcagagccctcttcgtgatgtttgcattcaactcacagtgctgaacctttctttgatagtgcagctttgaaacactctttttgtagaaactgcaagtggatatttggtcctctctgaggatttcgttggaaacgggataaaccgcacagaactaaaacagaagcattcacagaaaactcttggtgacgactgagtttaactcacagagctgaacattcctttggatggagcagtttcgaaacacactatttgtagaatctgcaagtggatatttgggcctctctgaggatttcgttggaaacgggataaaacgcacagaactaaaacagaagcattctcagaaactactttgtgatgattgcattcaagtcacagagttgaacattccctttgacagagcagtttggaaactctctttgtgtagaatctgcaagtggagatatggaccgctttgaggcctatggtagtaaaggaaatagcttcatataaaagctagacagtagcattctcagaaacttctttgtgatgcttgcattcaactcacagagttgaactttcctttcgagagagaagctttgaaacactctttttccagaatgtgcaagtggacatttggggagctttgaggcctggggtggaaaaggaattatcttcccgtaaaagctagatagaagcattgtcagaaacttctttgtgatgattgcattcaactcacagagttgaaggttccttttcaaacagcagtttccaatcactctttctgtggaatctgcaagtggatatttcgacctctttgaagatttcgttggaaacgggagaatcttcacagaaaagctaaacagaagcattctcagaaacttctctgtgatgtttgtgttcaactcccagagtttcacgttgcttttcatagagtagttctgaaacatgcttttcgtagtgtctgcaagtggacatttggagcgctttcaggcctgtggtggaaaacgaattatggtcacataaaaactggagagaagccttctcagaaacttctctgtgatgattgcattcaactcacagagttgaaccctcctatggatagagcagtgttgaaactctctttttgtggaatctgcaagtggatatgtggacctcgccgaagatgtctttggaaacgggaatatcttcacataaaaactaaacagaaggattctcagaaacttcttggtgatgtttgcattcaaatcccagagttgaaccttcctttgatagttcaggtttgaaacactctttttgtaggatctgcaagtggctatttggaccactcctgtggcattcgttcaaaacgggtatatcttcgcataaaatctagacagaagcattctcagaaaatactttgtgatgattgagttgaactcacagagctgaacattcctttggatggagcaggtttgagacacactttttgtagaatctacaagtggatatttggacctctctgaggatttcgttggaaacgggataactgcacctaactaaacggaagcattctcagaaactgctttgtgatgattgcattcacctcacagagttgaacattcctattgatagagcagtttggaaacactcttgttgtggaatgtgcaagtggagatttggagcgctttgaggcctatggtagtaaaggcaatagcttcatagaaaaattagacagatgcattctcaggaactttttggtgatgtttgtattcaactcccagagttgaactttcctttggaaagagcagctatgaaacactctttttctagaatctgcaagtggacgtttggagggctttgtggtttgtggtggaaaaggaaatatcttcacctaaatactagatagaagcattctcagaagcttctctgtgatgactgcattcaactcacggagttgaacactccttttgagagcgcagttttgaaactctctttctgtggcatccgcaaggggacatgtagacctctttgaagatttcgttggaaacggaatcatcttcacatcaaaactatgcagaagcagtctcagaatcttctttgtgatgtttgcattcaaatcccagagttgaactttcctttcaaagttcacgtttgaaacactctttttgcaggatctacaagtggatatttggaccactctgtgtccttcgttcgaaacgggtatatcttcacacgacatctagacagaagctttctcagaaaattctttgggatgattgagtggaactcacagagctgaacattccttgcgatgtagcagtttagaaacacactttctgcagaatctgcaagtgcatatttggacctctctgaggaattcgttggaaacgggataatttcagctgactaaacagaagcattctcagaaccttcttcgtgatgtctgcattcaactcacagtgtggaacctttctttgatagttcaggtttgaaacactctttttgtagaaactgcaaggggataattgcacttctttgaggcctaccgtagtaaaggaaataacttcctatagaaagaagacagaagcattctcagaaccctcttcgtgatgtttgcattcaactcacagtgctgaacctttctttgatagttcagctttgaaacactcttcttgtagaaactgcaagtggatatttggtcctctctgaggatttcgttggaaacgggataaaccgcacagaactaaacagaagaattctcagagccctcttcgtgatgtttgcattcaactcacagtgctgaacctttctttgatagtgcagcttcgaaacactctttttgtagaaactgcaagtggatgtttggtcctctctgaggatttcgttggaaacgggataaaccgcacagaactaaaacagaagcattgtcagaaacttctttgtgatgattgcattcaactcacagagttgaaggttccttttcaaacagcagtttccaatcactctttctgtggaatctgcaagtggatatttgggcctctctgaggatttcgttggaaacgggataaaacgcacagaactaaaacagaagcattctcagaaacttctctgtgatgtttgtgttcaactcccagagtttcacgttgcttttcatagagtagttctgaaacatgcttttcgtagtgtctgcaagtggacatttggagcgctttcaggcctgtggtggaaaacgaattatggtcacataaaaactggagagaagccttctcagaaacttctctgtgatgattgcattcaactcacagagttgaaccctcctatggatagagcagtgttgaaactctctttttgtggaatctgcaagtggatatgtggacctctccgaagatgtctttggaaacgggaatatcttcacataaaaactaaacagaagcattctcagaaacttcttggtgatgtttgcattcaaatcccagagttgaaccttcctttgatagttcaggtttgaaacactctttctgtaggatctgcaagtggctatttggaccactctgtggccttcgttcgaaacgggtatatcttcgcataaaatctagacagaaaagcattctcagaaaatactttgtgatgattgagtttaaatcacagagctgaccattcctttggatggagcaggtttgagacacactttttgtagaatctacaagtggatatttggacctctctgaggatttcgttggaaacgggataactgcacctaactaaacggaagcattgtcagaaactgctttgtgatgattgcattcacctcacagagttgaacattcctattgatagagcagtttggaaacactcttgttgtggaatgtgcaagtggagattcggagcgctttgaggcctatggtagtaaagggaatagcttcatagaaaaactagacagatgcattctcaggaactttttggtgatgtttgtattcaactcccagagttgaactttcctttggaaagagcagctatgaaacactctttttctagaatctgcaagtggacgtttggagggctttgtggtttgtggtggaaaaggaaatatcttcacctaaatactagatagaagcattctcagaagcttctctgtgatgactgcattcaactcacggagttgaacactccttttgagagcgcagttttgaaactctctttctgtggcatctgcaaggggacatgtagacttctttgaagatttcgttggaaacggaatcatcttcacatcaaaactatacagaagcagtctcagaatcttctttgtgatgtttgcattcaaatcccagagttgaactttcctttcaaagttcacgtttgaaacactctttttgcaggatctacaagtggatatttggaccactctgtgtccttcgtgcgaaacgggtatatcttcacatgacatctagacagaagctttctcagaaaattctttgggatgattgagttgaactcacagagctgaacattccttgcgatgtagcagtttagaaacacactttctgcagaatctgcaagtgcatatttggacctctctgaggaattcgttggaaacgggataatttcagctgactaaacagaagcattctcagaaccttcttcgtgatatctgccttcaactcacagtgtggaacctttccttgatagttcaggtttgaaacactctttttgtagaaactgcaaggggataattgcacttctttgaggcctaccgtagtaaaggaaataacttcctatagaaagaagacagaagaattctcagagccctcttcgtgatgtttgcattcaactcacagtgctgaacctttctttgatagtgcagctttgaaacactctttttgtagaaactgcaagtggatgtttggtcctctctgaggatttcgttggaaacgggataaaccgcacagaactaaaacagaagcattgtcagaaacttctttgtgatgattgcattcaactcacagagttgaaggttccttttcaaacagcagtttccaatcactctttctgtggaatctgcaagtggatatttgggcctctctgaggatttcgttggaaacgggataaaacgcacagaactaaaacagaagcattctcagaaacttctctgtgatgtttgtgttcaactcccagagtttcacgttgcttttcatagagtagttctgaaacatgcttttcgtagtgtctgcaagtggacatttggagcgctttcaggcctgtggtggaaaacgaattatggtcacataaaaactggagagaagccttctcagaaacttctctgtgatgattgcattcaactcacagagttgaaccctcctatggatagagcagtgttgaaactctctttttgtggaacctgcaagtggatatgtggacctctccgaagatgtctttggaaacgggaatatcttcacataaaaactaaacagaagcattctcagaaacttcttggtgatgtttgcattcaaatcccagagttgaaccttcctttgatagttcaggtttgaaacactctttctgtaggatctgcaagtggctatttggaccactctgtggccttcgttcgaaacgggtatatcttcgcataaaatctagacagaagcattctcagaaaatactttgtgatgattgagtttaaatcacagagctgaccattcctttggatggagcaggtttgagacacactttttgtagaatctacaagtggatatttggacctctctgaggatttcgttggaaacgggataactgcacctaactaaacggaagcattctcagaaactgctttgtgatgattgcattcacctcacagagttgaacattcctattgatagagcagtttggaaacactcttgttgtggaatgtgcaagtggagatttggagcgctttgaggcctatggtagtaaagggaatagcttcatagaaaaactagacagatgcattctcaggaactttttggtgatgtttgtattcaactcccagagttgaactttcctttggaaagagcagctatgaaacactctttttctagaatctgcaagtggacgtttggagggctttgtggtttgtggtggaaaaggaaatatcttcacctaaatactagatagaagcattctcagaagcttctctgtgatgactgcattcaactcacggagttgaacactccttttgagagcgcagttttgaaactctctttctgtggcatctgcaaggggacatgtagacctctttgaagatttcgttggaaacggaatcatcttcacataaaaactatacagaagcagtctcagaatcttctttgtgatgtttgcattcaaatcccagagttgaactttcctttcaaagttcacgtttgaaacactctttttgcaggatctacaagtggatatttggaccactctgtgtccttcgttcgaaacgggtatatcttcacatgacatctagacagaagctttctcagaaaattctttgggatgattgagttgagcaaacagagctgaacactccttgcgatgtagcagtttagaaacacactttctgcagaatctgcaagtgcatatgtggacctctctgaggaattcgttggaaaccggataatttcagctgactaaacagaagcattctcagaaccttcttcgtgatgtctgcattcaactcacagtgtggaacctttctttgatagttcaggtttgaaacaatctttttgtagaaactgcaaggggataattgcacttctttgaggcctaccatagtaaaggaaataacttcctatagaaagaagacagaagcattctcagaaccctcttcgtgatgtttgcattcaactcacagtgctgaacctttctttgatagttcagctttgaaacactcttcttgtagaaactgcaagtggatatttggtcctctctgaggatttcgttggaaacgggataaaccgcacagaactaaacagaagcattctcagaaccttcttcgtgatgtttgcattcaactcacagtgttgaacctttctttgatagttcaggttggaaacggtctttctgtagaaactgcaagtagatatttggacctctctgaggatttcgttggaaacgggataaaccgcacagaactaaaacagaagcattcacagaaaactcttggtgacgactgagtttaactcacagagctgaacattcctttggatggagcagtttcgaaacacactatttgtagaatgtgcaagtggatatttgggcctctctgaggatttcgttggaaacgggataaaccgcacagaactaaacagaagcattctcagaaactactttgtgatgattgcattcaagtcacagagttgaacattccctttgacagagcagtttggaaactctctttgtgtagaatctgcaagtggagatatggaccgctttgaggcctatggtagtaaaggaaatagcttcatataaaagctagacagtaagcattctcagaaacttctttgtgatgcttgcattcaactcacagagttgaactttcctttcgagagagaagctttgaaacactctttttccagaatctgcaagtggacatttggagggctttgaggcctgtggtggaaaaggaattaacttcccgtaaaagctagatagaagcattgtcagaaacttctttgtgatgattgcattcaactcacagagatgaaggttcctttacaaacagcagtttccaaacactctttctgtggaatctgcaagtggatatttggacctctttgaagatttcgttggaaacgggagaatcttcacagaaaagctaaacagaagcattctcagaaacttctctgtgatgtttgtgttcaactcccagagtttcatattgcttctcatagagtagttctgaaacatgcttttcgtagtgtctgcaagtggacatttggagcgctttcaggcctgtggtggaaaacgaattatggtcacataaaaactggagagaagccttctcagaaacttctctgtgatgattgcattcaactcacagagttgaaccctcctatggatagagcagtgttgaaactctctttttgtgtaatctgcaagtggatatgtggacctctccgaagatgtctttggaaacgggaatatcttcacataaaaactaaacagaagcattctcagaaacttcttggtgatgtttgcattcaaatcccagagttgaaccttcctttgatagttcaggtttgaaacactctttttgtaggatctgcaagtggctatttggaccactctgtggccttcgttcgaaacgggtatatcttcgcataaaatctagacagaagcattctcagaaaatactttgtgatgattgagtttaaatcacagagctgaccattcctttggatggagcaggtttgagacacactttttgtagaatctacaagtggatatttggacctctctgaggatttcgttggaaacgggataactgcacctaactaaacggaagcattctcagaaactgctttgtgatgattgcattcacctcacagagctgaacattcctattgatagagcagtttggaaacactcttgttgtggaatgtgcaagtggagatttggagcgctttgaggcctatggtagtaaagggaatagcttcatagaaaaactagacagatgcattctcaggaactttttggtgatgtttgtattcaactcccagagttgaactttcctttggaaagagcagctatgaaacactctttttctagaatctgcaagtggacgtttggagggctttgtggtttgtggtggaaaaggaaatatcttcacctaaatactagatagaagcattctcagaagcttctctgtgatgactgcattcaactcacggagttgaacactccttttgagagcgcagttttgaaactctctttctgtggcatctgcaaggggacatgtagacctctttgaagatttcgttggaaacggaatcatcttcacataaaaactatacagaagcagtctcagaatcttctttgtgatgtttgcattcaaatcccagagttgaactttcctttcgaagttcacgtttgaaacactctttttgcaggatctacaagtggatatttggaccactctgtgtccttcgtacgaaacgggtatatcttcacacgacatctagacagaagctttctcagcaaaattctttgggatgattgagtggaactcacagagctgaacattccttgcgatgtagcagtttagaaacacactttctgcagaatctgcaagtgcatatttggacctctctgaggaattcgttggaaacgggataatttcagctgactaaacagaagcattctcagaaccttcttcgtgatgtctgcattcaactcacagtgtggaacctttctttgatagttcaggtttgaaacactctttttgtagaaactgcaaggggataattgcacttctttgaggcctaccgtagtaaaggaaataacttcctatagaaagaagacagaagcattctcagaaccctcttcgtgatgtttgcattcaactcacagtgctgaacctttctttgatagttctgctttgaaacactcttcttgtagaaactgcaagtggatatttggtcctctctgaggatttcgttggaaacgggataaaccgcacagaactaaacagaagcattctcagaatcttcttcgtgatgattgcattcaactcacagtgttgaacctttctttgatagttcaggttggaaacggtctttctgtagaaactgcaagtagatatttggacctctctgaggatttcgttggaaacgggataaaccgcacagaactaaaacagaagcattcacagaaaactcttggtgacgactgagtttaactcacagagctgaacattcctttggatggagcagtttcgaaacacactatttgtagaatgtgcaagtggatatttgggcctctctgaggatttcgttggaaacgcgataaaccgcacagaactaaagagaagcattctcagaaactactttgtgatgattgcattcaagtcacagagttgaacattccctatgacagagcagtttggaaactctctttgtgtagaatctgcaagtggagatatggaccgctttgaggcctatggtagtaaaggaaagagcttcatataaaagctagacagtagcattctcagaaacttctttgtgatgcttgcattcaactcacagagttgaactttcctttcgagagagaagctttgaaacagtctttttccagaatctgcaagtggacatttggagggctttgaggcctgtggtggaaaaggaattatcttcccgtaaaagctagatagaagcattgtcagaaacttctttgtgatgattgcattcaagtcacagagttgaaggttccttttcaaagagcagtttccaatcactctttctgtggaatctgcaagtggatatttggacctctttgaagatttcgttggaaacgggagaatcttcacagaaaagctaaacagaagcattctcagaaacttctctgtgatgtttgtgttcaactcccagagtttcacattgcttctcatagagtagttctgaaacatgcttttcgtagtgtctgcaagtggacatttggagcgctttcaggcctgtggtggaaaacgaattatggtcacataaaaactggagagaagcattctcagaaacttctctgtgacgattgcattcaactcacagagttgaaccctcctatggatagagcagtgttgaaactctctttttgtggaatctgcaagcggatatgtggacctctccgaagatgtctttggaaacgggaatatcttcacataaaaactaaacagaagcattctcagaaacttcttggtgatgtttgcattcaaatcccagagttgaaccttcctttgatagttcaggtttgaaacactctttctgtaggatctgcaagtggctatttggaccactctgtggccttcgttcgaaacgggtatatcttcgcataaaatctagacagaagcattctcagaaaatactttgtgatgattgagtttaaatcacagagctgaccattcctttggatggagcaggtttgagacacactttttgtagaatctacaagtggatatttggacctctctgaggatttcgttggaaacgggataactgcacctaactaaacggaagcattctcagaaattgctttgtgatgattgcattcacctcacagagttgaccattcctattgatagagcagtttggaaacacccttgttgtggaatgtgcaagtggagatttggagcgctttgaggcctatggtagtaaagggaatagcttcatagaaaaactagacagatgcattctcaggaactttttggtgatgtttgcattcaactcccagagttgaactttcctttggaaagagcagctatgaaacactctttttctagaatctgcaagtggacgtttggagggctttgtggtttgtggtggaaaaggaaatatcttcacctaaatactagatagaagcattctcagaagcttctctgtgatgactgcattcaactcacggagttgaacactccttttgagagcgcagttttgaaactctctttctgtggcatctgcaaggggacatgtagacctctttgaagatttcgttggaaacggaatcatcttcacatcaaaactatacagaagcagtctcagaatcttctttgtgatgtttgcattcaaatcccagagttgaactttcctttcaaagttcacgtttgaaacactctttttgcaggatctacaagtggatatttggaccactctgtgtccttcgttcgaaacgggtatatcttcacatgacatctagacagaagctttctcagaaaattctttgggatgattgagtggaactcacagagctgaacattccttgcgatgtagcagtttagaaacacactttctgcagaatctgcaagtgcatatttggacctctctgaggaattcgttggaaacgggataatttcagctgactaaacagaagcattctcagaaccttcttcgtgatgtctgcattcaactcacagtgtggaacctttctttgatagttcaggtttgaaacactctttttgtagaaactgcaaggggataattgcacttctttgaggcctaccgtagtaaaggaaataacttcctatagaaagaagacagaagcattctcagaaccctcttcgtgatgtttgcattcaactcacagtgctgaacctttctttgatagttcagctttgaaacactcttcttgtagaaactgcaagtggatatttggtcctctctgaggatttcgttggaaacgggataaaccgcacagaactaaacagaaagaattctcagagccctcttcgtgatgtttgcattcaactcacagtgctgaacctttctttgatagtgcagctttgaaacactctttttgtagaaactgcaagtggatgtttggtcctctctgaggatttcgttggaaacgggataaaccgcacagaactaaaacagagcattctcagaaccctcttcgtgatgtttgcattcaactcacagtgttgaacctttctttgatagttcaggtttgaaacggtttttctgtagaaactgcaagtagatatttggacctctctgaggatttcgttggaaacgggataaaccgcacagaactaaacagaagcattcacagaaaactcttggtgacgactgagtttaactcacagagctgaacattcctttggatggagcagtttcgaaacacactatttgtagaatgtgcaagtggatatttaggcctctctgaggatttcgttggaaacgggataaaccgcacagaactaaacagaagcattctcagaaactactttgtgatgattgcattcaagtcacagagttgaacattccctttgacagagcagtttggaaactctctttgtgtagaatctgcaagtggagatacggaccgctttgaggcctatggtagtaaaggaaatagcttcatataaaagctagacagtagcattctcagaaacttctttgtgatgcttgcattcaactcacagagttgaactttcctttcgagagagaagctttgaaacactctttttccagaatctgcaagtggacatttggagggctttgaggcctgtggtggaaaaggaattatcttcccgtaaaagctagatagaagcattgtcagaaacttctttgtgatgattgcattcaactcacagagttgaaggttccttttcaaagagcagtttccaatcactctttgtgtggaatctgcaagtggatatttggacctattttgaagatttcgttggaaacgggagaatcttcacagaaaagctaaacagaagcattctcagaaacttctctgtgatgtttgtgttcaactcccagagtttcacgttgcttttcatagagtagttctgaaacatgcttttcgtagtgtctgcaagtggacatttggagcgctttcaggcctgtggtggaaaacgaattatggtcacataaaaactggagagaagccttctcagaaacttctctgtgatgattgcattcagctcacagagttgaaccctcctatggatagagcagtgttgaaactctctttttgtggaatctgcaagtggatatgtggacctctccgaagatgtctttggaaacgggaatatcttcacataaaaactaaacagaagcattctcagaaacttcttggtgatgtttgcattcaaatcccagagttgaaccttcctttgatagttcaggtttgaaacactctttctgtaggatctgcaagtggctatttggaccactctgtggccttcgttcgaaacgggtatatcttcgcataaaatctagacagaagcattctcagaaaatactttgtgatgattgagtttaaatcacagagctgaccattcctttggatggagcaggtttgagacacactttttgtagaatctacaagtggatatttggacctctctgaggatttcgttggaaacgggataactgcacctaactaaacggaagcattctcagaaactgctttgtgatgattgcattcacctcacagagttgaacattcctattgatagagcagtttggaaacactcttgttgtggaatgtgcaagtggagatttggagcgctttgaggcctatggtagtaaagggaatagcttcatagaaaaactagacagatgcattctcaggaactttttggtgatgtttgtattcaactcccagagttgaactttcctttggaaagagcagctatgaaacactctttttctagaatctgcaagtggacgtttggagggctttgtggtttgtggtggaaaaggaaatatcttcacctaaatactagatagaagcattctcagaagcttctctgtgatgactgcattcaactcacggagttgaacactccttttgagagcgcagttttgaaactctccttctgtggcatccgcaaggggacatgtagacctctttgaagatttcgttggaaacggaatcatcttcacataaaaactatacagaagcagtctcagaatcttctttgtgatgtttgcattcaaatcccagagttgaactttcctttcaaagttcacgttagaaacactctttttgcaggatctacaagtggatatttggaccactctgtgtccttcgttcgaaacgggtatatcttcacatgacatctagacagaagctttctcagaaaattctttgggatgattgagttgaactcacagagctgagcattccttgcgatgtagcagtttagaaacacactttctgcagaatctgcaagtgcatatttggacctctgtgaggaattcgttggaaacgggataatttcagctgactaaacagaagcattctcagaaccttcttcgtgatgtctgcattcaactcacagtgtggaacctttctttgatagttcaggtttgaaacactctttttgtagaaactgcaaggggataattgcactctttgaggagtaccgtagtaaaggaaataacttcctctaaaaagaagacagaagcattctcagaaccttcttcgtgatgtttgcattcaactcacagtgttgaacctttctttgatagttcagctttgaaacactctttttgtagaaactgcaagtggatatttggtcctctctgaggatttcgttggaaacgggataaactgcacagaactaaacagaagcattcacagaaaactcttggtgacgactgagtttaactcacagagctgaacattcctttggatggagcagtttcgaaacacactatttgtagaatgtgcaactggatatttgggcctctctgaggatttcgttggaaacgggataaaacgcacagaactaaaacagaagcattctcagaaactactttgtgatgattgcattcaagtcacagagttgaacattccctttgacagagcagtttggaaactctctttgtgtagaatctgcaagtggagatatggaccgctttgaggcctatggtagtaaaggaaatagcttcatataaaagctagacagtagcattctcagaaacttctttgtgatgcttgcattcaactcacagagttgaactttcctttcgagagagaagctttgaaacactctttttccagaatctgcaagtggacatttggagggctttgaggcctgtggtggaaaaggaattatcttcccgtaaaagctagatagaagcattgtcagaaacttctttgtgatgattgcattcaactcacagagatgaaggttccttttcaaagagcagtttccaatcactctttgtgtggaatctgcaagtggatatttggacctattttgaagatttcgttggaaacgggagaatcttcacaggaaagctaaacagaagcattctcagaaacttctctgtgatgtttgtgttcaactcccagagtttcacattgcttttcatagagtagttctgaaacatgcttttcgtagtgtctacaagtggacatttggagcgctttcaggcctgtggtggaaaacgaattatggtcacataaaaactggagagaagccttctcagaaacttctctgtgatgattgcattcaactcacagagttgaaccctcctatggatagagcagtgttgaaactctctttttgtggaatctgcaagtggatatgtggacctctccgaagatgtctttggaaacgggaatatcttcacataaaaactaaacagaagcattctcagaaacttcttggtgatgtttgcattcaaatcccagagttgaaccttcctttgatagttcaggtttgaaacactctttttgtaggatctgcaagtggatatttggaccactctgtggccttcgttcgaaacgggtatatcttcgcataaaatctagacagaagcattctcagaaaatactttgtgatgattgagtttaactcacagagctgaacattcctttggatggagcaggtttgagacacactttttgtagaatctacaagtggatatttggacctctctgaggatttcgttggaaacgcgataactgcacctaactaaacggaagcattctcagaaactgctttgtgatgattgcattcacctcacagagttgaacattcctattgatagagcagtttggaaacactcttgttgtggaatgtgcaagtggagatttggagcgctttgaggcctatggtagtaaagggaatagcttcatagaaaaactagacagatgcattctcaggaactttttggtgatgtttgtattcaactcccagagttgaactttcctttggaaagagcaactatgaaacactctttttctagaatctgcaagtggacgtttggagggctttgtggtttgtggtggaaaaggaaatatcttcacctaaatactagatagaagcattctcagaagcttctctgtgatgactgcattcaactcacggagttgaacactccttttgagagcgcagttttgaaactctctttctgtggcatctgcaaggggacatgtagacctctttgaagatttcgttggaaacggaatcatcttcacataaaaactatacagaagcagtctcagaatcttctttgtgatgtttgcattcaaatcccagagttgaactttcctttcaaagttcacgtttgaaacactctttttgcaggatctacaagtggatatttggaccactctgtgtccttcgttcgaaacgggtatatcttcacatgacatctagacagaagctttctcagaaaattctttgggatgattgagtggaactcacagagctgaacattccttgcgatggagcagtttagaaacacactttctgcagaatctgcaagtgcatatttggacctctctgaggaattcgttggaaacgggataatttcagctgactaaacagaagcattctcagaaccttcttcgtgatgtctgcattcaactcacagtgtggaacctttctttgatagttcaggtttgaaacactctttttgtagaaactgcaaggggataattgcacttctttgaggcctactgtagtaaaggaaataacttcctatagaaagaagacagaagcattctcagaaccctcttcgtgatgtttgcattcaactcacagtgctgaacctttctttgatagttcagctttgaaacactcttcttgtagaaactgcaagtggatatttggtcctctctgaggatttcgttggaaacgggataaaccgcacagaactaaacagaagaattctcagagccctcttcgtgatgtttgcattcaactcacagtgctgaacctttctttgatagtgcagctttgaaacactctttttgtagaaactgcaagtggatgtttggtcctctctgaggatttcgttggaaacgggataaaacgcacagaactaaaacagaagcattgtcagaaacttctttgtgatgattgcattcaactcacagagttgaaggttccttttcaaacagcagtttccaatcactctttctgtggaatctgcaagtggatatttgggcctctctgaggatttcgttggaaacgggataaaacgcacagaactaaaacagaagcattctcagaaacttctctgtgatgtttgtgttcaactcccagagtttcacgttgcttttcatagagtagttctgaaacatgcttttcgtagtgtctgcaagtggacatttggagcgctttcaggcctgtggtggaaaacgaattatggtcacataaaaactggagagaagccttctcagaaacttctctgtgatgattgcattcaactcacagagttgaaccctcctatggatagagcagtgttgaaactctctttttgtggaatctgcaagtggatatgtggacctctccgaagatgtctttggaaacgggaatatcttcacataaaaactaaacagaagcattctcagaaacttcttggtgatgtttgcattcacatcgcagagttgatccttcctttgatacttcaagtttgaaacactctttttgtaggatctgcaagtggatatttggaccactctgtggccttcgttcgaaacgggtacatcttcgcataaaatctagacagaagcattctcagaaaatactttgtgatgattgagtttaaatcacagagctgaccattcctttggatggagcaggtttgagacacactttttgtagaatctacaagtggatatttggacctctctgaggattttgttggaaacgggataactgcacctaactaaacggaagcattctcagaaactgctttgtgatgattgcattcacctcacagagttgaacattcctattgatagagcagtttggaaacactcttgttgtggaatgtgcaagtggagatttggagcgctttgaggcctatggtagtaaagggaatagcttcatagaaaaactagacagatgcattctcaggaactttttggtgatgtttgtattcaactcccagagttgaactttcctttggaaagagcagctatgaaacactctttttctagaatctgcaagtggacgtttggagggctttgtggtttgtggtggaaaaggaaatatcttcacctaaatactagatagaagcattctcagaagcttctctgtgatgactgcattcaactcacggagttgaacactccttttgagagcgcagttttgaaactctctttctgtggcatctgcaaggggacatgtagacctctttgaagatttcgttggaaacggaatcatcttcacataaaaactatacagaagcagtctcagaatcttctttgtgatgtttgcattcaaatcccagagttgaactttcctttcaaagttcacgtttgaaacactctttttgcaggatctacaagtggatatttggaccactctgtgtccttcgttcgaaacgggtatatcttcacacgacatctagacagaagctttctcagaaaattctttgggatgattgagtggaactcacagagctgaacattccttgcgatgtagcagtttagaaacacactttctgcagaatctgcaagtgcatatttggacctctctgaggaattcgttggaaacgggataatttcagctgactaaacagaagcattctcagaaccttcttcgtgatgtctgcattcaactcacagtgtggaacctttctttgatagttcaggtttgaaacactctttttgtagaaactgcaaggggataattgcacttctttgaggcctaccgtagtaaaggaaataacttcttatagaaagaagacagaagcattctcagaaccctcttcgtgatgtttgcattcaactcacagtgctgaacctttctttgatagttcagctttgaaacactcttcttgtagaaactgcaagtggatatttggtcctctctgaggatttcgttggaaacgggataaactgcacagaactaaacagaagcattctcagaaccttcttcgtgatgtttgcattcaactcacagtgttgaacctttctttgatagttcaggtttgaaacggtctttctgtagaaactgcaagtagatatttggacctctctgaggatttcgttggaaacgggataacccgcacagaactaaaacagaagcattcacagaaaactcttggtgacgactgagtttaactcacagagctgaacattcctttggatggagcagtttcgaaacacactatttgtagaatgtgcaagtggatatttgggcctctctgaggatttcgttggaaacgggataaaccgcacagaactaaacagaagcattctcagaaactactttgtgacgattgcattcaagtcacagagttgaacattccctttgacagagcagtttggaaactctctttgtgtagaatctgcaagtggagatatggaccgctttgaggcctatggtagtaaaggtaatagcttcatatgaaagctagacagtagcattctcagaaacttctttgtgatgcttgcattcaactcacagagttgaactttcctttcgagagagaagctttgaaacactctttttccagaatctgcatgtggacatttggagggctttgaggcctgtggtggaaaaggaattaacttcccgtaaaagctagatagaagcattgtcagaaacttctttgtgatgattgcattcaactcacagagatgaaggttcctttacaaacagcagtttccaaacactctttctgtggaatctgcaagtggatatttggacctctttgaagatttcgttggaaacgggagaatcttcacagaaaagctaaacagaagcattctcagaaacttctctgtgatgtttgtgttcaactcccagagtttcacattgcttttcatagagtagttctgaaacatgcttttcgtagtgtctgcaagtggacatttggagcgctttcaggcctgtggtggaaatcgaattatggtcacataaaaactggagagaagccttctcagaaacttctctgtgatgattgcattcaactcacagatttgaaccctcctatggatagagcattcttgaaactctctttttgtggaatctgcaagtggatatgttgacctctccgaagatgtctttggaaacgggaatatcttcacataaaaactaaacagaagcattctcagaaacttcttggtgatgtttgcattcaaatcccagagttgaaccttcctgtgatagttcaggtttgaaacactctttttgtaggatctgcaagtggatatttggaccactctgtggccttcgttcgaaacgggtacatcttcacataaaatctagacagaagcattctcagaaaatactttgtgatgattgagtttaactcacagagctgaacattcctttggatggagcaggtttgagacacactttttgtagaatctgcaagtggatatttggacctctctgaggatttcgttggaaacgcgataactgcacctaactaaacggaagcattctcagtaaactgctttgtgatgattgcattcacctcacagagttgaacattcctattgatagagcagtttggaaacactcttcttgtggaatgtgcaagtggagatttggagcgctttgaggcctatggtagtaaagggaatagcttcatagaaaaactagacagatgcattctcaggaactttttggtgatgtttgtattcaactcccagagttgaactttcctttggaaagagcagctatgaaacactctttttctagaatctgcaagtggacgtttggagggctttgtggtttgtggtggaaaatgaaatatcttcacctaaatactagatagaagcattctcagaagcttctctgtgatgactgcattcaactcacggagttgaacactccttttgagagcgcagttttgaaactctctttctgtggcatctgcaaggggacatgtagacctctttgaagatttcgttggaaacggaatcatcttcacataaaaactatacagaagcagtctcagaatcttctttgtgatgtttgcattcaaatcccagagttgaactttcctttcaaagttcacgtttgaaacactctttttgcaggatctacaagtggatatttggaccactctgtgtccttcgttcgaaacgggtatatcttcacacgacatctagacagaagctttctcagaaaattctttgggatgattgagtggaactcacagagctgaacattccttgcgatgtagcagtttagaaacacactttctgcagaatctgcaagtgcatatttggacctctctgaggaattcgttggaaacgggataatttcagctgactaaacagaagcattctcagaaccttcttcgtgatgtctgcattcaactcacagtgtggaacctttctttgatagttcaggtttgaaacactctttttgtagaaactgcaaggggataattgcacttctttgaggcctaccgtagtaaaggaaataacttcctatagaaagaagacagaagcattctcagaaccctcttcgtgatgtttgcattcaactcacagtgctgaacctttctttgatagttcagctttgaaacactcttcttgtagaaactgcaagtggatatttggtcctctctgaggatttcgttggaaacgggataaaccgcacagaactaaacagaagaattctcagagccctcttcgtggtgtttgcattcaactcacagtgctgaacctttctttgatagtgcagctttgaaacactctttttgtagaaactgcaagtggatatttgttcctctctgaggatttcgttggaaacgggataaaacgcacagaactaaaacagaagcattcacagaaaactcttggtgacgactgagtttaactcacagagctgaacattcctttggatggagcagtttcgaaacacactatttgtagaatctgcaagtggatatttgggcctctctgaggatttcgttggaaacgggataaaacgcacagaactaaaacagaagcattctcagaaactactttgttatgattgcattcaagtcacagagttgaacattccctttgacagagcagtttggaaactctgtttgtgtagaatctgcaagtggagatatggaccgctttgaggcctatggtagtaaaggaaatagcttcatataaaagctagacagtagcattctcagaaacttctttgtgatgcttgcattcaactcacagagttgaactttcctttcgagagagaagctttgaaacactctttttccagaatgtgcaagtggacatttggggagctttgaggcctgtggtggaaaaggaattatcttcccgtaaaagctagatagaagcattgtcagaaacttctttgtgatgattgcattcaactcacagagttgaaggttccttttcaaagagcagtttccaatcactctttctgtggaatctgcaagtggatatttcgacctctttgaagatttcgttggaaacgggagaatcttcacagaaaagctaaacagaagcattctcagaaacttctctgtgatgtttgtgttcaactcccagagtttcacgttgcttttcatagagtagttctgaaacatgcttttcgtagtgtctgcaagtggacatttggagcgctttcaggcctgtggtggaaaacgaattatggtcacataaaaactggagagaagccttctcagaaacttctctgtgatgattgcattcatctcaaagagttgaaccctcctatggatagagcagtgttgaaactctgtttttgtggaatctgcaagtggatatgtggacctcgccaaagatgtctttggaaacgggaatatcttcacataaaaactaaacagaagcattctcagaaacttcttggtgatgtttgcattcaaatcccagagttgaaccttcctttgatagttcaggtttgaaacactctttttgtacgatctgcaagtggatatttggaccattctgtggccttcgttcaaaacgggtacatcttcgcataaaatctagacagaagcattctcagaaaatactttgtgatgattgagtttaactcacagagctgaacattcctttggatggagcaggtttgagacacaccttttgtagaatctacaagtggatatttggacctctctgaggatttcgttggaaacgggataactgcacctaactaaacggaagcattctcagaaactgctttgtgatgattgcattcacctcacagagttgaacattcctattgatagagcagtttggaaacactcttgttgtggaatgtgcaagtggagatttggagcgctttgaggcctatggtagtaaagggaatagcttcatagaaaaactagacagatgcattctcaggaactttttggtgatgtttgtattcaactcccagagttgaactttcctttggaaagagcagctatgaaacactctttttctagaatctgcaagtggacgtttggagggctttgtggtttgtggtggaaaaggaaatatcttcacctaaatactagatagaagcatcctcagaagcttctctgtgatgactgcattcaactcacggagttgaacactccttttgagagcgcagttttgaaactctctttctgtggcatctgcaaggggacatgtagacctctttgaagatttcgttggaaacggaatcatcttcacataaaaactacacagaagcagtctcagaatcttctttgtgatgtttgcattcaaatccccgagttgaactttcctttcaaagttcacgtttgaaacactctttttgcaggatctacaagtggatatttggaccactctgtgtccttcgatcaaaacgggtatatcttcacatgacatctagacagaagctttctcagaaaattctttgggatgattgagttgaactcacagagctgagcattccttgcgatgtagcagtttagaaacacactttctgcagaatctgcaagtgcatatttggacctctgtgaggaattcgttggaaacgggataatttcagctgactaaacagaagcattctcagaaccttcttcgtgatgtctgcattcaactcacagtgtggaacctttctttgatagttcaggtttgaaacactctttctgtagaaactgcaaggggataattgcactctttgaggagtaccgtagtaaaggaaataacttcctataaaaagaagacagaagcattctcagaaccctcttcgtgatgtttgcattcaactcacagtgctgaacctttctttgatagttcagcttcgaaacactctttttgtagaaactgcaagtggatatttggtcctctctgaggatttcgttggaaacgggataaactgcacagaactaaacagaagcattctcagaaccttcttcgtgatgtttgcattcaactcacagtgttgaacctttctttgatagttcaggtttgaaacggtctttctgtagaaactgcaagtagatatttggacctctctgaggatttcgttggaaacgggataacccgcacagaactaaaacagaagcattcacagaaaactcttggtgacgactgagtttaactcacagagctgaacattcctttggatggagcagtttcgaaacacactatttgtagaatgtgcaagtggatatttaggcctctctgaggatttcgttggaaacgggataaaccgcacagaactaaacagaagcattctcagtaaactactttgtgatgattgcattcaagtcacagagttgaacattccctttgacagagcagtttggaaactctctttgtgtagaatctgcaagtggagatatggaccgctttgaggcctatggtagtaaaggaaatagcttcatataaaagctagacagtagcattctcagaaacttctttgtgatgcttgcattcaactcacagagttgaactttcctttcgagagagaagctttgaaacactctttttccagaatctgcaagtggacatttggagggctttgaggcctgtggtggaaaaggaattatcttcccgtaaaagctagatagaagcattgtcagaaacttctttgtcacgattgcattcaactcacagagatgaaggttcctttacaaacagcagtttccaaacactctttctgtggaatctgcaagtggatatttggacctctttgaagatttcgttggaaacgggagaatcttcacagaaaagctaaacagaagcatcctcagaaacttctctgtgatgtttgtgttcaactcccagagtttcacattgcttttcatagagtagttctgaaacatgcttttcgtagtgtctgcaagtggacatttggagcgctttcaggcctgtggtggaaaacgaattatggtcccataaaaactggagggaagccttctcagaaacttctctgtgatgattgcattcaactcacagatttgaaccctcctatggatagagcattgttgaaactctctttttgtggaatctgcaagtggatatgtggacctctccgaagatgtctttggaaacgggaatatcttcacataaaaactaaacagaagcattctcagaaacttcttggtgatgtttgcattccaatcccagagttgaaccttcctgtgatagttcaggtttgaaacactctttttgtaggatctgcaagtggatatttggaccactctgtggccttcgttcgaaacgggtacatcttcacataaaatctagacagaagcattctcagaaaatactttgtgatgattgagtttaaatcacagagctgaccattcctttggatggagcaggtttgagacacactttttgtagaatctacaagtggatatttggacctctctgaggatttcgttggaaacgggataactgcacctaactaaacggaagcattctcagaaactgctttgtgatgattgcattcacctcacagagttgaacattcctattgatagagcagtttggaaacactcttgttgtggaatgtgcaagtggagatttggagcgctttgaggcctatggtagtaaagggaatagcttcatagaaaaactagacagatgcattctcaggaactttttggtgatgtttgtattcaactcccagagttgaactttcctttggaaagagcagctatgaaacactctttttctagaatctgcaagtggacgtttggagggctttgtggtttgtggtggaaaaggaaatatcttcacctaaatactagatagaagcattctcagaagcttctctgtgatgactgcattcaactcacggagttgaacactccttttgagagcgcagttttgaaactctctttctgtggcatctgcaaggggacatgtagacctctttgaagatttcgttggaaacggaatcatcttcacataaaaactatacagaagcagtctcagaatcttctttgtgatgtttgcattcaaatcccagagttgaactttcctttcaaagttcacgtttgaaacactctttttgcaggatctacaagtggatatttggaccactctgtgtccttcgttcgaaacgggtatatcttcacacgacatctagacagaagctttctcagaaaattctttgggatgattgagtggaactcacagagctgaacattccttgcgatgtagcagtttagaaacacactttctgcagaatctgcaagtgcatatttggacctctctgaggaattcgttggaaacgggataatttcagctgactaaacagaagcattctcagaaccttcttcgtgatgtctgcattcaactcacagtgtggaacctttctttgatagttcaggtttgaaacactctttttgtagaaactgcaaggggataattgcacttctttgaggcctaccgtagtaaaggaaataacttcctatagaaagaagacagaaagcattctcagaaccctcttcgtgatgtttgcattcaactcacagtgctgaacctttctttgatagttcagctttgaaacactcttcttgtagaaactgcaagtggatatttggtcctctctgaggatttcgttggaaacgggataaaccgcacagaactaaacagagcattctcaaaaccttcttcgtgatgtttgcattcaactcacggtgttgaacctttctttgatagttcaggtttgaaacggtctgtctgtagaaactgcaagtagatatttggacctctctgaggatttcgttggaaacgggataaaccgcacagaactaaaacagaagcattcacagaaaactcttggtgacgactgagtttaactcacagagctgaacattcctttggatggagcagtttcgaaacacactatttgtagaatgtgcaagtggatatttgggcctctctgaggatttcgttggaaacgggataaaccgcacagaactaaacagaagcattctcagaaactactttgtgatgattgcattcaagtcacagagttgaacattccctttgacagagcagtttggaaactctctttgtgtagaatctgcaagtggagatatggaccgctttgaggcctatggtagtaaaggaaatagcttcatataaaagctagacagtagcattctcagaaacttctttgtgatgcttgcattcaactcacagagttgaactttcctttcgagagagaagctttgaaacactctttttccagaatctgcaagtggacatttggagggctttgaggcctgtggtggaaaaggaattaacttcccgtaaaagctagatagaagcattgtcagaaacttctttgtgatgattgcattcaactcacagagatgaaggttcctttacaaacagcagtttccaaacactctttctgtggaatctgcaagtggatatttggacctctttgaagatttcgttggaaacgggagaatcttcacagaaaagctaaacagaagcattctcagaaacttctctgtgatgtttgtgttcaactcccagagtttcacattgcttttcatagagtagttctgaaacatgcttttcgtagtgtctacaagtggacatttggagcgctttcaggcctgtggtggaaaacgaattatggtcacataaaaactggagagaagccttctcagaaacttctctgtgatgattgcattcaactcacagagttgaaccctcctacggatagagcagtgttgaaactctctttttgtggaatctgcaagtggatacgtggacctctccgaagatgtctttggaaacgggaatatcttcacataaaaactaaacagaaagcattctcagaaacttcttggtgatgtttgcattcaaatcccagagttgaaccttcctttgatagttcaggtttgaaacactctttttgtaggatctgcaagtggatatttggaccactctgtggccttcgttcgaaacgggtatatcttcgcataaaatctagacagaagcattctcagaaaatactttgtgatgattgagtttaactcacagagctgaacattcctttggatggagcaggtttgagacacactttttgtagaatctacaagtggatatttggacctctctgaggatttcgttggaaacgggataactgcacctaactaagcggaagcattctcagaaactgctttgtgatgattgcattcacctcacagagttgaacattcctattgatagagcagtttggaaacactcttgttgtggaatgtgcaagtggagatttggagcgctttgaggcctgtggtagtaaagggaatagcttcatagaaaaactagacagatgcattctcaggaactttttggtgatgtttgtattcaactcccagagttgaactttcctttggaaagagcagctatgaaacactctttttctagaatctgcaagtggacgtttggagggctttgtggtttgtggtggaaaaggaaatatcttcacctaaatactagatagaagcattctcagaagcttctctgtgatgactgcattcaactcacggagttgaacactccttttgagagcgcagttttgaaactctctttctgtggcatctgcaaggggacatgtagacctctttgaagatttcgttggaaacggaatcatcttcacataaaaactatacagaagcagtctcagaatcttctttgtgatgtttgcattcaaatcccagagttgaactttcctttcaaagttcacgtttgaaacactctttttgcaggatctacaagtggatatttggaccactctgtgtccttcgttcgaaacgggtatatcttcacacgacatctagacagaagctttctcagaaaattctttgggatgattgagtggaactcacagagctgaacattccttgcgatgtagcagtttagaaacacactttctgcagaatctgcaagtgcatatttggacctctctgaggaattcgttggaaacgggataatttcagctgactaaacagaagcattctcagaaccttcttcgtgatgtctgcattcaactcacagtgtggaacctttctttgatagttcaggtttgaaacactctttttgtagaaactgcaaggggataattgcacttctttgaggcctaccgtagtaaaggaaataacttcctatagaaagaagacagaagcattctcagaaccctcttcgtgatgtttgcattcaactcacagtgctgaaactttctttgatagttcagctttgaaacactcttcttggagaaactgcaagtggatattttgtcctctctgaggatttcgttggaaacgtgataaaccgcacagaactaaacagaagcattctcagaaccttcttcgtgatgtttgcattcaactcacagtgttgaacctttctttgatagttcaggttggaaacggtctttctgtagaaactgcaagtagatatttggacctctctgaggatttcgttggaaacgggataaaccgcacagaactaaaacagaagcattcacagaaaactcttggtgacgactgagtttaactcacagtagctgaacattcctttggatggagcagtttcgaaacacactatttgtagaatgtgcaagtggatatttgggcctctctgaggatttcgttggaaacgggataaaccgcacagaactaaacagaagcattctcagaaactactttgtgatgattgcattcaagtcacagagttgaacattccctttgacagagcagtttggaaactctctttgtgtagaatctgcaagtggagatatggaccgctttgaggcctatggtagtaaaggaaatagcttcatataaaagctagacagtagcattctcagaaacttctttgtgatgcttgcattcaactcacagagttgaactttcctttagagagagaagctttgaaacactctttttccagacatctgcaagtggacatttggagggctttgaggcctgtgttggaaaaggaattatcttcccgtaaaagctagatagaagcattgtcagaaacttctttgtgatgattgcattcaactcacagagttgaaggttccttttcaaacagcagtttccaatcactctttctgtggaatctgcaagtggatatttggacctctttgaagatttcgttggaaacgggagaatcttcacagaaaagctaaacagaagcattctcagaaacttctctgtgatgtttgtgttcaactcccagagtttcacattgcttctcatagagtagttctgaaacatgcttttcgtagtgtctgcaagtggacatttggagcgctttgaggcctgtggtggaaaacgaattatggtcacataaaaactggagagatgccttctcagaaacttctctgtgatgattgcattcaactcacagagttgaaccctcctatggatagagcagtgttgaaactctctttttgtggaatctgcaagtggatatgtggacctctccgaagacgtctttggaaacgggaatatcttcacataaaaactaaacagaagcattctcagaaacttcttggtgatgtttgcattcaaatcccagagttgaaccttcctttgatagttcaggtttgaaacactctttttgtaggatctgcaagtggctatttggaccactctgtggccttcgttcgaaacgggtatatcttcgcataaaatctagacagaagaattctcagaaaatactttgtgatgattgagttgaactcacagagctgaacattcctttggatggagcaggtttgagacacactttttgtagaatctacaagtggatatttggacctctctgaggatttcgttggaaacgggataactgcacctaactaaacggaagcattctcagaaactgctttgtgatgattgcattcacctcacagagttgaacattcctattgatagagcagtttggaaacactcttgttgtggaatgtgcaagtggagatttggagcgctttgaggcctatggtagtaaagggaatagcttcatagaaaaactagacagatgcattctcaggaactttttggtgatgtttgtattcaactcccagagttgaaatttcctttggaaagagcagctatgaaacactctttttctagaatctgcaagtggacgtttggagggctttgtggtttgtggtggaaaaggaaatatcttcacctaaatactagagagaagcattctcagaagcttctctgtgatgactgcattcaactcacggagttgaacactccttttgagagcgcagttttgaaactctttctgtggcatctgcaaggggacatgtagacctctttgaagatttcgttggaaacggaatcatcttcacataaaaactatacagaagcagtctcagaatcttctttgtgatgtttgcattcaaatcccagagttgaactttcctttcaaagttcacgtttgaaacactctttttgcaggatctacaagtggatatttggaccactctgtgtccttcgttcgaaacgggtataacttcacacgacatctagacagaagctttctcagaaaattctttgggatgattgagttgaactcacagagctgaacattccttgcgatgtagcagtttagaaacacactttctgcagaatctgcaagtacatatttggacctctctgaggaattcgttggaaacgggataatttcagctgactaaacagaagcattctcagaaccttcttcgtgatgtctgcattcaactcacagtgtggaacctttctttgatagttcaggtttgaaacactctttttgtagaaactgcaaggggaaaattgcacttctttgagtcctaccgtagtaaaggaaataacttcctataaaaagaagacagaagcattctcagaaccctcttcgtgatgtttgcattcaactcacagtgctgaacctttctttgatagttcagctttgaaacactcttcttgtagaaactgcaagtggatatttggtcctctctgaggatttcgttggaaacgggataaaccgcacagaactaaacagaagcattctcagagccctcttcgtgatgtttgcattcaactcacagtgctgaacctttctttgatagtgcagctttgaaacactctttttgtagaaactgcaagtggatatttggtcctctctgaggatttcgttggaaacgggataaaccgcacagaactaaaacagaagcattcacagaaaactcttggtgacgactgagtttaactcacagagctgaacattcctttggatggagcagtttcgaaacacactatttgtagaatctgcaagtggatatttgggcctctctgaggatttcgttggaaacgggataaaacgcacagaactaaaacagaagcattctcagaaactactttgtgatgattgcattcaagtcacagagttgaacattccctttgacagagcagtttggaaactctctttgtgtagaatctgcaagtggagatatggaccgctttgaggcctatggtagtaaaggaaataccttcatataaaagctagacagtagcattctcagaaacttctttgtgatgcttgcattcaactcacagagttgaactttcctttcgagagagaagctttgaaacactctttttccagaatgtgcaagtggacatttggggagctttgaggcctgtggtggaaaaggaattatcttcccgtaaaagctagatagaagcattgtcagaaacttctttgagatgattgcattcaactcacagagttgaaggttccttttcaaacagcagtttccaatcactctttctgtggaatctgcaagtggatatttcaacctctttgaagatttcgttggaaacgggagaatcttcacagaaaagctaaacagaagcattctcagaaacttctctgtgatgtttgtgttcaactcccagagtttcacgttgcttttcatagagtagttctgaaacatgcttttcgtagtgtctgcaagtggacatttggagcgctttcaggcctgtggtggaaaacgaattatggtcacatgaaaactggagagaagccttctcagaaacttctctgtgatgattgcattcaactcacagagttgaaccgtcctatggatagagcagtgttgaaactctctttttgtggaatctgcaagtggatatgtggacctctccgaagatgtctttggaaacggggctatcttcacataaaaactaaacagaagcattctcagaaacttcttggtgatgtttgcattcaaatcccagagttgaaccttcctttgatagttcaggtttgaaacactctttttgtaggatctgcaagtggatatttggaccactctgtggccttcgttcgaaacgggtacatcttcgcataaaatctagacagaagcattgtcagaaacgtctttgtgatgattgcattcaactgacagagttgaaggttgcttttcaaacagcagtttccaaacactctttctgtggaatctgcaagtggatgtttggacctctctgaggatttcgttggaaacgggataactgcacctaactaagcggaagcattctcagaaacttctctgtgatgtttgtgttcaactcccagagtttcacattgcttctcgtagagtagttctgaaacatgcttttcgtagtgtctgcaagtggtcatttggagcgctttccggcctgtggtggaaaacgaattatggtcacataaaaactggagagaagccttctcagaaacttctctgtgatgattgcattcaactcacagagttgaaccctcctatggatagagcagtgttgaaactctctttttgtggaatctgcaagtggatatgtggacctctccgaagatgtctttggaaacgggaatatcttcacataaaaactaaacagaagcattctcagaaacttcttggtgatgtttgcattcaaatcccagagttgaaccttcctttgatagttcaggtttgaaacactctttctgtaggatctgcaagtggctatttggaccactctgtggccttcgttcgaaatgggtatatcttcgcataaaatctagacagaagcattctcagaaaatactttgtgatgattgagtttaactcacagagctgaacattcctttggatggagcaggtttgagacacaccttttgtagaatctacaagtggatatttggacctctctgaggatttcgttggaaacgggataactgcacctaactaaacggaagcattctcagaaactgctttgtgatgattgcattcacctcacagagttgaacattcctattgatagagcagtttggaaacactcttgttgtggaatgtgcaagtggagatttggagcgctttgaggcctatggtagtaaagggaatagcttcatagaaaaactagacagatgcattctcaggaactttttggtgatgtttgtattcaactcccagagttgaactttcctttggaaagagcagctatgaaacactctttttctagaatctgcaagtggacgtttggagggctttgtggtttgtggtggaaaaggaaatatcttcacctaaatactagatagaagcattctcagaagcttctctgtgatgactgcattcaactcacggagttgaacactccttttgagagcgcagttttgaaactctctttctgtggcatctgcaaggggacatgtagacctctttgaagatttcgttggaaacggaatcatcttcacataaaaactatacagaagcagtctcagaatcttctttgtgatgtttgcattcaaatcccagagttgaactttcctttcaaagttcacgtttgaaacactctttttgcaggatctacaagtggatatttggaccactctgtgtccttcgttcgaaacgggtatatcttcacaggacatctagacagaagctttctcagaaaattctttgggatgattgagtggaactcacagagctgaacattccttgcgatgtagcagtttagaaacacactttctgcagaatctgcaagtgcatatttggacctctctgaggaattcgttggaaacgggataatttcagctgactaaacagaagcattctcagaaccttcttcgtgatgtctgcattcaactcacagtgtggaacctttctttgatagttcaggtttgaaacactctttttgtagaaactgcaaggggataattgcacttctttgaggcctaccgtagtaaaggaaataacttcctatagaaagaagacagaagcattctcagaaccctcttcgtgatgtttgcattcaactcacagtgctgaacctttctttgatagttcagctttgaaacactcttcttgtagaaactgcaagtggatatttggtcctctctgaggatttcgttggaaacgggataaaccgcacagaactaaacagaagaattctcagagccctcttcgtgatgtttgcattcaactcacagtgctgaacctttctttgatagtgcagctttgaaacactctttttgtagaaactgcaagtggatgtttggtcctctctgaggatttcgttggaaacgggataaaccgcacagaactaaaacagaagcattgtcagaaacttctttgtgatgattgcattcaactcacagagttgaaggttccttttcaaacagcagtttccaatcactctttctgtggaatctgcaagtggatatttgggcctctctgaggatttcgttggaaacgggataaaacgcacagaactaaaacagaagcattctcagaaacttctctgtgatgtttgtgttcaactcccagagtttcacgttgcttttcatagagtagttctgaaacatgcttttcgtagtgtctgcaagtggacatttggagcgctttcaggcctgtggtggaaaacgaattatggtcacataaaaactggagagaagccttctcagaaacttctctgtgatgattgcattcaactcacagagttgaaccctcctatggatagagcagtgttgaaactctctttttgtggaatctgcaagtggatatgtggacctctccgaagatgtctttggaaacgggaatatcttcacataaaaactaaacagaagcattctcagaaacttcttggtgatgtttgcattcaaatcccagagttgaaccttcctttgatagttcaggtttgaaacactctttctgtaggatctgcaagtggctatttggaccactctgtggccttcgttcgaaacgggtatatcttcgcataaaatctagacagaagcattctcagaaaatactttgtgatgattgagtttaaatcacagagctgaccattcctttggatggagcaggtttgagacacactttttgtagaatctacaagtggatatttggacctctctgaggatttcgttggaaacgggataactgcacctaactaaacggaagcattctcagaaactgctttgtgatgattgcattcacctcacagagttgaacattcctattgatagagcagtttggaaacactcttgttgtggaatgtgcaagtggagatttggagcgctttgaggcctgtggtagtaaagggaatagcttcatagaaaaactagacagatgcattctcaggaactttttggtgatgtttgtattcaactcccagagttgaactttcctttggaaagagcagctatgaaacactctttttctagaatctgcaagtggacgtttggagggctttgtggtttgtggtggaaaaggaaatatcttcacctaaatactagatagaagcattctcagaagcttctctgtgatgactgcattcaactcacggagttgaacactccttttgagagcgcagttttgaaactctctttctgtggcatctgcaaggggacatgtagacctctttgaagatttcgttggaaacggaatcatcttcacataaaaactatacagaagcagtctcagaatcttctttgtgatgtttgcattcaaatcccagagttgaactttcgtttcaaagttcacgtttgaaacactctttttgcaggatctacaagtggatatttggaccactctgtgtccttcgttcaaaacgggtatatcttcacatgacatctagacagaagctttctcagaaaattctttgggatgattgagttgaactcacagagctgagcattccttgcgatgtagcagtttagaaacacactttctgcagaatctgcaagtgcatatttggacctctgtgaggaattcgttggaaacgggataatttcagctgactacacagaagcattctcagaaccttcttcgtgatgtctgcattcaactcacagtgtggaacctttctttgatagttcaggtttgaaacactctttttgtagaaactgcaaggggataattgcacttctttgaggcctaccgtagtaaaggaaataacttcctatagaaagaagacagaagcattctcagaaccctcttcgtgatgtttgcattcaactcacagtgctgaaactttctttgatagttcagctttgaaacactcttcttgtagaaactgcaagtggatatttggtcctctcttaggatttcgttggaaacgggataaaccgcacagaactacacagaagcattctcagaaccttcttcgtgatgtttgcattcaactcacagtgttgaacctttctttgatagttcaggttggaaacggtctttctgtagaaactgcaagtagatatttggacctctctgaggatttcgttggaaacgggataaaccgcacagaactaaaacagaagcattcacagaaaactcttggtgacgactgagtttaactcacagagatgaacatctctttggatggagcagtttcgaaacacactatttgtagaatgtgcaagtggatattggggcctctctgaggatttcgttggaaacgggataaaccgcacagaactaaacagaagcattctcagaaactactttgtgatgattgcatgcaagtcacagagttgaacattccctttgacagagcagtttggaaactctctttgtgtagaatctgcaagtggagatatggaccgctttgaggactatggcagtaaaggaaatagcttcatataaaagctagacagtagcattctcagaaacttctttgtgatgcttgcattcaactcacagagttgaactttcctttcgagagagaagctttgaaacactctttttccagaatctgcaagtggacattttgagggctttgaggcctgtggtggaaaaggaattatcttcccgtaaaagctagacagaagcattgtcagaaacttctttgtgacgattgcattcaactcacagagatgaaggttcctttacaaacagcagtttccaaacactctttctgtggaatctgcaagtggatatttggacctctttgaagatttcgttggaaacgggagaatcttcacagaaaagctaaacagaagcattctcagaaacttctctgtgatgtttgtgttcaactcccagattttcacattgcttttcatagagtagttctgaaacatgcttttcgtagtgtctgcaagtggacatttggagcgctttcaggcctgtggtggaaaacgaattatggtcccataaaaactggagagaagccttctcagaaacttctctgtgatgattgcattcaactcacagatttgaaccctcctatggatagagcattgttgaaactctctttttgtggaatctgcaagtggatatgtggacctctccgaagatgtctttggaaacgggaatatcttcacataaaaactaaacagaagcattctcagaaacttcttggtgatgtttgcattcaaatcccagagttgaaccttcctgtgatagttcaggtttgaaacactctttttgtaggatctgcaagtggatatttggaccactctgtggccttcgttcgaaacgggtacatcttcacataaaatctagacagaagcattctcagaaaatactttgtgatgattgagtttaactcacagagctgaacattcctttggatggagcaggtttgagacacactttttgtagaatctacaagtggatatttggacctctctgaggatttcgttggaaacgcgataactgcacctaactaaacggaagcattctcagaaactgctttgtgatgattgcattcacctcacagagttgaacattcctattgatagagcagtttggaaacactcttgttgtggaatgtgcaagtggagatttggagcgctttgaggcctatggtagtaaagggaatagcttcatagaaaaactagacagatgcattctcaggaactttttggtgatgtttgtattcaactcccagagttgaactttcctttggaaagagcagctatgaaacactctttttctagaatctgcaagtggacgtttggagggctttgtggtttgtggtggaaaaggaaatatcttcacctaaatactagatagaagcattctcagaagcttctctgtgatgactgcattcaactcacggagttgaacactccttttgagagcgcagttttgaaactctctttctgtggcatctgcaaggggacatgtagacctctttgaagatttcgttggaaacggaatcatcttcacataaaaactatacagaagcagtctcagaatcttctttgtgatgtttgcattcaaatcccagagttgaactttcctttcaaagttcacgtttgaaacactctttttgcaggatctacaagtggatatttggaccactctgtgtccttcgttcgaaacgggtatatcttcacacgacatctagacagaagctttctcagaaaattctttgggatgattgagtggaactcacagagctgaacattccttgcgatgtagcagtttagaaacacactttctgcagaatctgcaagtgcatatttggacctctctgaggaattcgttggaaacgggataatttcagctgactaaacagaagcattctcagaaccttcttcgtgatgtctgcattcaactcacagtgtggaacctttctttgatagttcaggtttgaaacactctttttgtagaaactgcaaggggataattgcacttctttgaggcctaccgtagtaaaggaaataacttcctatagaaagaagacagaagcattctcagaaccctcttcgtgatgtttgcattcaactcacagtgctgaacctttctttgatagttcagctttgaaacactcttcttgtagaaactgcaagtggatatttggtcctctctgaggatttcgttggaaacgggataaaccgcacagaactaaacagaagaattctcagagccctcttcgtgatgtttgcattcaactcacagtgctgaacctttctttgatagtgcagctttgaaacactctttttgtagaaactgcaagtggatatttggtcctctctgaggatttcgttggaaacgggataaaccgcacagaactaaaacagaagcattgtcagaaacttctttgtgatgattgcattcaactcacagagttgaaggttccttttcaaacagcagtttccaatcactctttctgtggaatctgcaagtggatatttgggcctctctgaggatttcgttggaaacgggataaaacccacagaactaaaacagaagcattctcagaaacttctctgtgatgtttgtgttcaactcccagagtttcacgttgcttttcatagagtagttctgaaacatgcttttcgtagtgtctgcaagtggacatttggagcgctttcaggcctgtggtggaaaacgaattatggtcacataaaaactggagagaagccttctcagaaacttctctgtgatgattgcattcaactcacagagttgaaccctccctatggatagagcagtgttgaaactctctttttgtggaatctgcaagtggatatgtggacctctccgaagatgtctttggaaacgggaatatcttcacataaaaactaaacagaagcattctcagaaacttcttggtgatgtttgcattcaaatcccagagttgaaccttcctttgatagttcaggtttgaaacactctttctgtaggatctgcaagtggctatttggaccactctgtggccttcgttcgaaacgggtatatcttcgcataaaatctagacagaagcattctcagaaaatactttgtgatgattgagttgaactcacagagctgaacattcctttggatggagcaggtttgagacacactttttgtagaatctacaagtggatatttggacctctctgaggatttcgttggaaacgggataactgcacctaactaaacggaagcattctcagtaaactgctttgtgatgattgcattcacctcacagagttgaacattcctattgatagagcagtttggaaacactcttcttgtggaatgtgcaagtggagatttggagcgctttgaggcctatggtagtaaagggaatagcttcatagaaaaactagacagatgcattctcaggaactttttggtgatgtttgtattcaactcccagagttgaactttcctttggaaagagcagctatgaaacactctttttctagaatctgcaagtggacgtttggagggctttgtggtttgtggtggaaaatgaaatatcttcacctaaatactagatagaagcattctcagaagcttctctgtgatgactgcattcaactcacggagttgaacactccttttgagagcgcagttttgaaactctctttctgtggcatctgcaaggggacatgtagacctctttgaagatttcgttggaaacggaatcatcttcacataaaaactatacagaagcagtctcagaatcttctttgtgatgtttgcattcaaatcccagagttgaactttcctttcaaagttcacgtttgaaacactctttttgcaggatctacaagtggatatttggaccactctgtgtccttcgttcgaaacgggtatatcttcacacgacatctagacagaagctttctcagaaaattctttgggatgattgagtggaactcacagagctgaacattccttgcgatgtagcagtttagaaacacactttctgcagaatctgcaagtgcatatttggacctctctgaggaattcgttggaaacgggataatttcagctgactaaacagaagcattctcagaaccttcttcgtgatgtctgcattcaactcacagtgtggaacctttctttgatagttcaggtttgaaacactctttttgtagaaactgcaaggggataattgcacttctttgaggcctaccgtagtaaaggaaataacttcctatagaaagaagacagaagatttctcagaaccctcttcgtgatgtttgcattcaactcacagtgctgaacctttctttgatagttcagctttgaaacactcttcttgtagaaactgcaagtggatatttggtcctctctgaggatttcgttggaaacgggataaaccgcacagaactaaacagaagatttctcagagccctcttcgtgatgtttgcattcaactcacagtgctgaacctttctttgatagtgcagctttaaaacactctttttgtagaaactgcaagtggatatttggtcctctctgaggatttcgttggaaacggaataaaccgcacagaacaaaaacagaagcattctcagaaccttcttcgtgatgtttgcattcaactcacagtgttgaacctttctttgatagttcaggtttgaaacggtctttctgtagaaactgcaagtagatatttggacctctctgaggatttcgttggaaacgggataaaccgcacagaactaaaacagaagcattcacagaaaactcttggtgacgactgagtttaactcacagagctgaacattcctttggatggagcagtttcgaaacacactatttgtagaatgtgcaagtggatatttaggcctctctgaggatttcgttggaaacgggataaaccgcacagaactaaacagaagcattctcagaaactactttgtgatgattgcattcaagtcacagagttgaacattccctttgacagagcagtttggaaactctctttgtgtagaatctgcaagtggagatatggaccgctttgaggcctatggtagtaaaggaaatagcttcatataaaagctagacagtagcattctcagaaacttctttgtgatgcttgcattcaactcacagagttgaactttcctttcgagagagaagctttgaaacactctttttccagaatctgcaagtggacatttggagggctttgaggcctgtggtggaaaaggaattatcttcccgtaaaagctagatagaagcattgtcagaaacttctttgtgatgattgcattcaactcacagagttgaaggttccttttcaaagagcagtttccaatcactctttctgtggaatctgcaagtggatatttggacctctttgaagatttcgttggaaacgggagaatcttcacaggaaagctaaacagaagcattctcagaaacttctctgtgatgtttgtgttcaactcccagagtttcacgttgcttttcatagagtagttctgaaacatgcttttcgtagtgtctgcaagtggacatttggagcgctttcaggcctgtggtggaaaacgaattatggtcacataaaaactggagagaaagccttctcagaaacttctctgtgatgattgcattcaactcacagagttgaaccctcctatggatagagcagtgttgaaactctctttttgtcgaatctgcaagtggatatgtggacctctccgaagatgtctttggaaacgggaatatcttcacataaaaactaaacagaagcattctcagaaacttcttggtgatgtttgcattcaaatcccagagttgaaccttcctttgatagttcaggtttgaaacactctttttgtaggatctgcaagtggctatttggaccactctgtggccttcgttcgaaacgggtatatcttcgcataaaatcagacagaagcattctcagaaaatactttgtgatgattgagtttaaatcacagagctgaacattcctttggatggagcaggtttgagacacactttttgtagaatctacaagtggatatttggacctctctgaggatttcgttggaaacgggataactgcacctaactaaacggaagcattctcagaaactgctttgtgatgattgcattcacctcacagagttgaacattcctattgatagagcagtttggaaacactcttgttgtggaatgtgcaagtggagatttggagcgctttgaggcctatggtagtaaagggaatagcttcatagaaaaactagacaggatgcattctcaggaactttttggtgatgtttgtattcaactcccagagttgaactttcctttggaaagagcagctatgaaacactctttttctagaatctgcaagtggacgtttggagggctttgtggtttgtggtggaaaaggaaatatcttcacctaaatactagatagaagcattctcagacgcttctctgtgatgactgcattcaactcacggagttgaacactccttttgagagcgcagttttgaaactctctttctgtggcatctgcaaggggacatgtagacctctttgaagatttcgttggaaacggaatcatcttcacatcaaaactatacagaagcagtctcagaatcttctttgtgatgtttgcattcaaatcccagagttgaactttcctttcaaagttcacgtttgaaacactctttttgcaggatctacaagtggatatttggaccactctgtgtccttcgttcgaaacgggtatatcttcacacgacatctagacagaagctttctcagaaaattctttgggatgattgagtggaactcacagagctgaacattccttgcgatgtagcagtttagaaacacactttctgcagaatctgcaagtgcatatttggacctctctgaggaattcgttggatacgggataatttcagctgactaaacagaagcattctcagaaccttcttcgtgatgtctgcattcaactcacagtgtggaacctttctttgatagttcaggtttgaaacactctttttgtagaaactgcaaggggataattgcacttctttgaggcctaccgtagtaaaggaaataacttcctatagaaagaagacagaagaattctcagagccctcttcgtgatgtttgcattcaactcacagtgctgaacctttctttgatagtgcagctttgaaacactcttcttgtagaaactgcaagtggatatttggtcctctctgaggatttcgttggaaacgggataaaccgcacagaactaaacagaagcattctcagaaccttcttcgtgatgtttgcattcaactcacagtgttgaacctttctttgatagttcaggtttgaaacggtctttctgtagaaactgcaagtagatatttggacctctctgaggatttcgttggaaacgggataacccgcacagaactaaaacagaagcattcacagaaaactcttggtgacgactgagtttaactcacagagctgaacattcctttggatggagcagtttcgaaacacactatttctagaaggtgcaagtggatatgtgggcctctctgaggatttcgttggaaacgggataaaccgcacagaactaaacagaatcattctcagaaactactttgtgatgattgcattcaagtcacagagttgaacattccctttgacagagcagtttggaaactctctttgtgtagaatctgcaagtggagatatggaccgctttgaggcctatggtagtaaaggaaatagcttcatataaaagctagacagtagcattctcagaaacttctttgtgatgcttgcattcaactcacagagttgaactttcctttcgagagagaagctttgaaacactctttttccagaatctgcaagtggacatttggagggcgttgaggcctgtggtggaaaaggaattatcttcccgtaaaagctagatagaagctttgtcagaaacttctttgtgatgattgcattcaagtcacagagttgaaggttccttttcaaagagcagtttccaatcactctttctgtggaatctgcaagtggatatttggacctctttgaagatttcgttggaaacgggagaatcttcacagaaaagctaaacagaagcattctcagaaacttctctgtgatgtttgtgttcaactcccagagtttcacattgcttctcatagagtagttctgaaacatgcttttcgtagtgtctgcaagtggacatttggagcgctttcaggcctgtggtggaaaacgaattatggtcacataaaaactggagagaagccttctcagaaacttctctgtgatgattgcattcaactcacagagttgaaccctcctatggatagagcagtgttgaaactctctttttgtggaatctgcaagcggatatgtggacctctccgaagatgtctttggcaacgggaatatcttcacataaaaactaaacagaagcattctcagaaacttcttggtgatgtttgcattcaaatcccagagttgaaccttcctttcatagttcaggtttgcaacactctttttgtaggatctgcaagtggatatttggaccactctgtggccttcgttcgaaacgggtacatcttcgcataaaatctagacagaagcattctcagaaaatactttgtgatgactgagttgaactcacagagctgaacattcctttggatggagcaggtttgagacacactttttgtagaatctacaagtggatatttggacctctctgaggatttcgttggaaacgggataactgcacctaactaaacggaagcattctcagaaactgctttgtcatgattgcattcacctcacagagttgaacattcctattgatagagcagtttggaaacactcttgttgtggaatgtgcaagtggagatttggagcgctttgaggcctatggtagtaaagggaatagcttcatagaaaaactagacagatgcattctcaggaactttttggtgatgtttgtattcaactcccagagttgaactttcctttggaaagagcagctatgaaacactctttttctagaatctgcaagtggacgtttggagggctttgtggtttgtggtggaaaaggaaatatcttcacctaaatactagatagaagcattctcagaagcttctctgtgatgactgcattcaactcacggagttgaacactccttttgagagcgcagttttgaaactctctttctgtggcatctgcaaggggacatgtagacctctttgaagatttcgttggaaacggaatcatcttcacataaaaactatacagaagcagtctcagaatcttctttgtgatgtttgcattcaaatcccagagttgaactttcctttcaaagttcacgtttgaaacactctttttgcaggatctacaagtggatatttggaccactctgtgtccttcgttcgaaacgggtatatcttcacacgacatctagacagaagctttctcagaaaattctttgggatgattgagtggaactcacagagctgaacattccttgcgatgtagcagtttagaaacacactttctgcagaatctgcaagtgcatatttggacctctctgaggaattcgttggaaacgggataatttcagctgactaaacagaagcattctcagaaccttcttcgtgatgtctgcattcaactcacagtgtggaacctttctttgatagttcaggtttgaaacactctttttgtagaaactgcaaggggataattgcacttctttgaggcctaccgtagtaaaggaaataacttcctatagaaagaagacagaagcattctcagaaccctcttcgtgatgtttgcattcaactcacagtgctgaacctttctttgatagttcagctttgaaacactcttcttgtagaaactgcaagtggatatttggtcctctctgaggatttcgttggaaacgggataaaccgcacagaactaaacagaagaattctcagagccctcttcgtgatgtttgcattcaactcacagtgctgaacctttctttgatagtgcagctttgaaacactctttttgtagaaactgcaagtggatgtttggtcctctctgaggatttcgttggaaacgggataaaccgcacagaactaaaacagaagcattcacagaaaactcttggtgacgactgagtttaactcacagagctgaacattcctttggatggagcagtttcgaaacacactatttgtagaatgtgcaagtggatatttgggcctctctgaggatttcgttggaaacgggataaaccgcacagaactaaacagaagcattctcagaaactactttgtgatgattgcattcaagtcacagagttgaacattccctttgacagagcagtttggaaactctctttctgtagaatctgcaagtggagatatggaccgctttgaggcctatggtagtaaaggaaatagcttcatataaaagctagacagtagcattctcagaaacttctttgtgatgcttgcattcaactcacagagttgaactttcctttcgagagagaagctttgaaacactctttttccagaatctgcaagtggacatttggagggctttgaggcctgtggtagaaaaggaattaacttcccgtaaaagctagatagaagcattgtcagaaacttctttgtgatgattgcattcaactcacagagttgaaggttccttttcaaacagcagtttccaatcactctttctgtggaatctgcaagtggatatttgggcctctctgaggatttcgttggaaacgggataaaacgcacagaactaaaacagaagcattctcagaaacttctctgtgatgtttgtgttcaactcccagagtttcacgttgcttttcatagagtagttctgaaacatgcttttcgtagtgtctgcaagtggacatttggagcgctttcaggcctgtggtggaaaacgaattatggtcacataaaaactggagagaagccttctcagaaacttctctgtgatgattgcattcaactcacagagttgaaccctcctatggatagagcagtgttgaaactctctttttgtggaatctgcaagtggatatgtggacctctccgaagatgtctttggaaacgggaatatcttcacataaaaactaaacagaagcattctcagaaacttcttggtgatgtttgcattcaaatcccagagttgaaccttcctttgatagttcaggtttgaaacactctttctgtaggatctgcaagtggctatttggaccactctgtggccttcgttcgaaacgggtatatcttcgcataaaatctagacagaagcattctcagaaaatactttgtgatgattgagtttaaatcacagagctgaccattcctttggatggagcaggtttgagacacactttttgtagaatctacaagtggatatttggacctctctgaggatttcgttggaaacgggataactgcacctaactaaacggaagcattctcagaaactgctttgtgatgattgcattcacctcacagagttgaacattcctattgatagagcagtttggaaacactcttgttgtggaatgtgcaagtggagatttggagcgctttgaggtctatggtagtaaagggaatagcttcatagaaaaactagacagatgcattctcaggaactttttggtgatgtttgtattcaactcccagagttgaactttcctttggaaagagcagctatgaaacactctttttctagaatctgcaagtggacgtttggagggctttgtggtttgtggtggaaaaggaaatatcttcacctaaatactagatagaagcattctcagaagcttctctgtgatgactgcattcaactcacgggagttgaacactccttttgagagcacagttttgaaactctctttctgtggcatctgcaaggggacatgtagacctctttgaagatttcgttggaaacggaatcatcttcacataaaatctatacagaagcagtctcagaatcttctttgtgatgtttgcattcaaatcccagagttgaactttcctttcaaagttcacgtttgaaacactctttttgcaggatctacaagtggatatttggaccactctgtgtccttcgttcgaaacgggtatatcttcacacgacatgctagacagaagctttctcagaaaattctttgggatgattgagtggaactcacagagctgaacattccttgcgatgtagcagtttagaaacacactttctgcagaatctgcaagtgcatatttggacctctctgaggaattcgttggaaacgggataatttcagctgactaaacagaagcattctcagaaccttcttcgtgatgtctgcattcaactcacagtgtggaacctttctttgatagttcaggtttgaaacactctttttgtagagactgcaaggggataattgcacttctttgaggcctaccgtagtaaaggaaataacttcctatagaaagaagacagaagcattctcagaaccctcttcgtgatgtttgcattcaactcacagtgctgaacctttctttgatagttcagctttgaaacactcttcttgtagaaactgcaagtggatatttggtcctctctgaggatttcgttggaaacgggataaactgcacagaactaaacagaagaattctcagagccctcttcgtgatgtttgcattcaactcacagtgctgaacctttctttgatagtgcagctttgaaacactctttttgtagaaactgcaagtggatgtttggtcctctctgaggatttcgttggaaacgggataaaccgcacagaactaaaacagaagcattgtcagaaacttctttgtgatgattgcattcaactcacagagttgaaggttccttttcaaacagcagtttccaatcactctttctgtggaatctgcaagtggatatttgggcctctctgaggatttcgttggaaacgggataaaacgcacagaactaaaacagaagcattctcagaaacttctctgtgatgtttgtgttcaactcccagagtttcacgttgcttttcatagagtagttctgaaacatgcttttcgtagtgtctgcaagtggacatttggagcgctttcaggcctgtggtggaaaacgaattatggtcacataaaaactggagagaagccttctcagaaacttctctgtgatgattgcattcaactcacagagttgaaccctcctatggatagagcagtgttgaaactctctttttgtggaatctgcaagtggatatgtggacctctccgaagatgtctttggaaacgggaatatcttcacataaaaactaaacagaagcattctcagaaacttcttggtgatgtttgcattcaaatcccagagttgaaccttcctttgatagttcaggtttgaaacactctttttgtaggatctgcaagtggctatttggaccactctgtggccttcgttcgaaacgggtatatcttcgcataaaatctagacagaagcattctcagaaaatactttgtgatgattgagtttaaatcacagagctgaacattcctttggatggagcaggtttgagacacactttttgtagaatctacaagtggatatttggacctctctgaggatttcgttggaaacgggataactgcacctaactaaacggaagcattctcagaaactgctttgtgatgattgcattcacctcacagagttgaacattcctattgatagagcagtttggaaacactcttgttgtggaatgtgcaagtggagatttggagcgctttgaggcctatggtagtaaagggaatagcttcatagaaaaactagacagatgcattctcaggaactttttggtgatgtttgtattcaactcccagagttgaactttcctttggaaagagcagctatgaaacactctttttctagaatctgcaagtggacgtttggagggctttgtggtttgtggtggaaaaggaaatatcttcacctaaatactaggatagaagcattctcagaagcttctctgtgatgactgcattcaactcacggagttgaacactccttttgagagcgtagttttgaaactctctttctgtggcatctgcaaggggacatgtagacctctttgaagatttcgttggaaacggaatcatcttcacataaaaactatacagaagcagtctcagaatcttctttgtgatgtttgcattcaaatcccaggagttgaactttcctttcaaagttcacgtttgaaacactctttttgcaggatctacaagtggatatttggaccactctgtgtccttcgttcgaaacgggtataacttcacacgacatctagacagaagctttctcagaaaattctttgggatgattgagtggaactcacagaagctgaacattccttgcgatgtagcagtttagaaacacactttctgcagaatctgcaagtgcatatgtggacctctctgaggaattcgttggaaacgggataatttcagctgactaaacagaagcattctcagaaccttcttcgtgatgtctgcattcaactcacagtgtggaacctttctttgatagttcaggtgtgaaacactctttttgtagaaactgcaaggggataattgcacttctttgaggcctaccgtagtaaaggaaataacttcctatagaaagaagacagaagcattctcagaaccctcttcgtgatgtttgcattcaactcacagtgctgaacctttctttgatagttcagctttgaaacactcttcttgtagaaactgcaagtggatatttggtcctctctgaggatttcgttggaaacgggataaaccgcacagaactaaacagaagcattctctgaactttcttcgtgatgtttgcattcaactcacagtgttgaacctttctttgatagttcaggtttgaaacggtctttctgtagaaactgcaagtagatatttggacctctctgaggatttcgttggaaacgggataaaccgcacagaactaaaacagaagcattcacagaaaactcttggtgacgactgagtttaactcacagagctgaacattcctttggatggagcagtttcgaaacacactatttgtagaatctgcaagtggatatttgggcctctctgaggatttcgttggaaacgggataaaccgcacagaactaaacagaagcattctcagaaactactttgtgatgattgcattcaagtcacagagttgaacatttcctttgacagagcagtttggaaactctctttgtgtagaatctgcaagtggagatatggaccgctttgaggcctatggtagtaaaggaaatagcttcatataaaagctagacagtagcattctcagaaacttctttgtgatgcttgcattcaactcacagagttgaactttcctttcgagagagaagctttgaaacactctttttccagaatgtgcaagtggacatttggggagctttgaggcctggggtggaaaaggaattatcttcccgtaaaagctagatagaagcattgtcagaaacttctttgtgatgattgcattcaactcacagagttgaaggttccttttcaaacagcagtttccaatcactctttctgtggaatctgcaagtggatatttcgacctctttgaagatttcgttggaaacgggagaatcttcacagaaaagctaaacagaagcattctcagaaacttctctgtgatgtttgtgttcaactcccagagtttcacgttgcttttcatagagtagttctgaaacatgcttttcgtagtgtctgcaagtggacatttggagcgctttcaggcctgtggtggaaaacgaattatggtcacataaaaactggagagaagccttctcagaaacttctctgtgatgattgcattcaactcacagagttgaaccctcctatggatagagcagtgttgaaactctctttttgtggaatctgcaagtggatatgtggacctctccgaagatgtctttggaaacgggaatatcttcacataaaaactaaacagaagcattctcagaaacttcttggtgatgtttgcattcaaatcccagagttgaaccttcctttgatagttcaggtttgaaacactctttttgtaggatctgcaagtggctatttggaccactctgtggccttctttcgaaacgggtatatcttcgcataaaatctagacagaagcattctcagaaaatactttgtgatgattgagtttaaatcacagagctgaccattcctttggatggagcaggtttgagacacactttttgtagaatctacaagtggatatttggacctctctgaggatttcgttggaaacgggataactgcacctaactaaacggaagcattctcagaaactgctttgtgatgattgcattcacctcacagagttgaacattcctattgatagagcagtttggaaacacacttgttgtggaatgtgcaagtggagatttggagcgctttgaggcctatggtagtaaagggaatagcgtcatagaaaaactagacagatgcattctcaggaactttttggtgatgtttgtattcaactcccagagttgaactttcctttggaaagagcagctatgaaacactctttttctagaatctgcaagtggacgtttggagggctttgtagtttgtggtggaaaaggaaatatcttcacctaaatactagatagaagcattctcagaagcttctctgtgatgactgcattcaactcacggagttgaacactccttttgagagcgcagttttgaaactccctttctgtggcatctgcaaggggacatgtagacctctttgaagatttcgttggaaacggaatcatcttcacataaaaactatacagaagcagtctcagaatcttctttgtgatgtttgcattcaaatcccagagttgaactttcctttcaaagttcacgtttgaaacactctttttgcaggatctacaagtggatatttggaccactctgtgtccttcgttcgaaacgggtatatcttcacatgacatctagacagaagctttctcagaaaattctttgggatgattgagtggaactcaacagagctgaacattccttgcgatgtagcagtttagaaacacactttctgcagaatctgcaagtgcatatttggacctctctgaggaattcgttggaaacgggataatttcagctgactaaacagaagcattctcagaaccttcttcgtgatgtctgcattcaactcacagtgtggaacctttctttgatagttcaggtttgaaacactctttttgtagaaactgcaaggggataattgcacttctttgaggcctaccgtagtaaaggaaataacttcctatagaaagaagacagaagcattctcagaaccctcttcgtgatgtttgcattcaactcacagtgctgaacctttctttgatagttcagctttgaaacactcttcttgtagaaactgcaagtggatatttggtcctctctgaggatttcgttggaaacgggataaaccgcacagaactaaacagaagaattctcagagccctcttcgtgatgtttgcattcaactcacagtgctgaacctttctttgatagtgcagctttgaaacactctttttgtagaaactgcaagtggatatttggtcctctctgaggatttcgttggaaacgggataaaccgcacagaactaaaacagaagcattcacagaaaactcttggtgacgactgagtttaactcacagagctgaacattcctttggatggagcagtttcgaaacacactatttgtagaatctgcaagtggatatttgggcctctctgaggatttcgttggaaacgggataaaacgcacagaactaaaacagaagcattctcagaaactactttgtgatgattgcattcaagtcacagtagttgaacattccctttgacagagcagtttggaaactctctttgtgtagaatctgcaagtggagatatggaccgctttgaggcctatggtagtaaaggaaatagcttcatataaaagctagacagtagcattctcagaaacttctttgtgatgcttgcattcaactcacagagttgaactttcctttcgagagagaagctttgaaacactctttttccagaatctgcaagtggacatttggagggctttgaggcctgtggtggaaaaggaattatcttcccgtaaaagctagatagaagcattgtcagaaacttctttgtgatgattgcattcaactcacagagatgaaggttcctttacaaacagcagtttccaaacactctttctgtggaatctgcaagtggatatttggacctctttgaagatttcgttggaaacgggagaatcttcacagaaaatctaaacagaagcattctcagaaacttctctgtgatgtttgtgttcaactcccagaatttcacattgcttttcatagagtagttctgaaacatgcttttcgtagtgtctgcaagtggacatttggagcgctttcaagcctgtggtggaaaacgaattatggtcccataaaaactggagagaagccttctcagaaacttctctgtgatgattgcattcaactcacagatttgaaccctcctatggatagagcattgttgaaactctctttttgtggaatctgcaagtggatatgtggacctctccgaagatgtctttggaaacgggaatatcttcacataaaaactaaacagaagcattctcagaaacttcttggtgatgtttgcattcaaatcccagagttgaaccttcctgtgatagttcaggtatgaaacactctttttgtaggatctgcaagtggatatttggaccactctgtggccttcgttcgaaacgggtacatcttcacataaaatctagacagaagcattctcagaaaatactttgtgatgattgagtttaactcacagagctgaacattcctttggatggagcaggtttgagacacactttttgtagaatctacaagtggatatttggacctctctgaggatttcgttggaaacgcgataactgcacctaactaaacggaagcattctcagaaactactttgtgatgattgcattcacctcacagagttgaacattcctattgatagagcagtttggaaacactcttgttgtggaatgtgcaagtggagatttggagcgctttgaggcctatggtagtaaagggaatagcttcatagaaaaactagacagatgcattctcaggaactttttggtgatgtttgtattcaactcccagagttgaactttcctttggaaagagcagctatgaaacactctttttctacaatctgcaagtggacgtttggagggctttgtggtttgtggtggaaaaggaaatatcttcacctaaatactagatagaagcattctcagaagcttctctgtgatgactgcattcaactcacggagttgaacactccttttgagagcgcagttttgaaactctctttctgtggcatctgcaaggggacatgtagacctctttgaagatttcgttggaaacggaatcatcttcacataaaaactatacagaagcagtctcagaatcttctttgtgatgtttgcattcaaatcccagagttgaactttcctttcaaagttcacgtttgaaacactctttttgcaggatctacaagtggatatttggaccactctgtgtccttcgttcgaaacgggtatatcttcacacgacatctagacagaagctttctcagaaaattctttgggatgattgagtggaactcacagagctgaacattccttgcgatgtagcagtttagaaacacactttctgcagaatctgcaagtgcatatttggacctctctgaggaattcgttggaaacgggataatttcagctgactaaacagaagcattctcagaaccttcttcgtgatgtctgcattcaactcacagtgtggaacctttctttgatagttcaggtttgaaacactctttttgtagaaactgcaaggggataattgcacttctttgaggcctaccgtagtaaaggaaataacttcctatagaaagaagacagaagcattctcagaaccctcttcgtgatgtttgcattcaactcacagtgctgaacctttctttgatagttcagctttgaaacactcttcttgtagaaactgcaagtggatatttggtcctctctgaggatttcgttggaaacgggataaaccgcacagaactaaacagaagcattctcagaaccttcttcgtgatgtttgcattcaactcacagtgttgaacctttctttgatagttcaggtttgaaacggtctttctgtagaaactgcaagtagatatttggacctctctgaggatttcgttggaaacgggataaaccgcacagaactaaaacagaagcattcacagaaaactcttggtgacgactgagtttaactcacagagctgaacattcctttggatggagcagtttcgaaacacactatttgtagaatgcgcaagtggatatttgggactctctgaggatttcgttggaaacgggataaaccgcacagaactaaacagaagcattctcagaaactactttgtgatgattgcattcaagtcacagagttgaacattccctttgacagagcattttggaaactctctttgtgtagaatctgcaagtggagatatggaccgctttgaggcctatggtagtaaaggaaatagcttcatataaaagctagacagtagcattctcagaaacttctttgtgatgcttgcattcaactcacagagttgaactttcctttcgagagagaagctttgaaacactctttttccagaatgtgcaagtggacatttggggagctttgaggcctgtggaggaaaaggaattatcttcccgtaaaagctagatagaagcattgtcagaaacttctttgtgattattgcattcaactcacagagttgaaggttccttttgaaacagcagtttccaaacactctttctgtggaatctacaagtagatatttggacctctttgaagatttcgttggaaacgggagaatcttcacagaaaagctaaacagaagcattctcagaaacttctctgtgatgtttgtgttcaactcccagagtttcacgttgcttttcatagagtagttctgaaacatgcttttcgtagtgtctgcaagtggacatttggagcgctttcaggcctgtggtggaaaacgaattatggtcacataaaaactggagagaagcattctcagaaaatactttgtgatgattgagtttaaatcacagagctgaccattcctttggatggagcaggtttgagacacactttttgtagaatctacaagtggatatttggacctctctgaggatttcgttggaaacgggataactgcacctaactaaacggaagcattctcagaaactgctttgtgatgattgcattcacctcacagagttgaacattcctattgatagagcagtttggaaacactcttgttgtggaatgtgcaagtggagatttggcgcgctttgaggcctatggtagtaaagggaatagcttcatagaaaaactagacagatgcattctcaggaactttttggtgatgtttgtattcaactcccagagttgaactttcctttggaaagagcagctatgaaacactctttttctagaatctgcaagtggacgtttggagggctttgtggtttgtggtggaaaaggaaatatcttcacctaaatactagatagaagcattctcagaagcttctctgtgatgactgcattcaactcacggagttgaacactccttttgagagcgcagttttgaaactctctttctgtggcatctgcaaggggacatgtagacctcttggaagatttcgttggaaacggaatcatcttcacatcaaaactatacagaagcagtctcagaatcttattagtgatgtttgcattccaatcccagagttgaactttcctttcaaagttcacgtttgaaacactctttttgcaggatctacaagtggatatttggaccactctgtgtccttcgttcgaaacggttatatcttcacatgacatctagacaggagctttctcagaaaattctttgggatgattgagtggaactcacagagctgaacattccttgcgatgtagcagtttagaaacacactttctgcagaatctgcaagtgcatatttggacctctctgaggaattcgttggaaacgggataatttcagctgactaaacagaagcattctcagaaccttcttcgtgatgtctgcattcaactcacagtgtggaacctttctttgatagttcaggtttgaaacactctttttgtagaaactgcaaggggataattgcacttctttgaggcctaccgtagtaaaggaaataacttcctatagaaagaagacagaagcattctcagaaccctcttcgtgatgtttgcattcaactcacagtgctgaacctttctttgatagttcagctttgaaacactcttcttgtagaaactgcaagtggatatttggtcctctctgaggatttcgttggaaacgggataaaccgcacagaactaaacagaagaattctcagagccctcttcgtgatgtttgcattcaactcacagtgctgaacctttctttgatagtgcagctttgaaacactctttttgtagaaactgcaagtggatgtttggtcctctctgaggatttcgttggaaacgggataaaccgcacagaactaaaacagaagcattgtcagaaacttctttgtgatgattgcattcaactcacagagttgaaggttccttttcaaacagcagtttccaatcactctttctgtggaatctgcaagtggatatttgggcctctctgaggatttcgttggaaacgggataaaacgcacagaactaaaacagaagcattctcagaaacttctctgtgatgtttgtgttcaactcccagagtttcacgttgcttttcatagagtagttctgaaacatgcttttcgtagtgtctgcaagtggacatttggagcgctttcaggcctgtggtggaaaacgaattatggtcacataaaaactggagagaagccttctcagaaacttctctgtgatgattgcattcaactcacagagttgaaccctcctatggatagagcagtgttgaaactctctttttgtggaatctgcaagtggatatgtggacctctccgaagatgtctttggaaacgggaatatcttcacataaaaactaaacagaagcattctcagaaacttcttggtgatgtttgcattcaaatcccagagttgaaccttcctttgatagttcaggtttgaaacactctttctgtaggatctgcaagtggctatttggaccactctgtggccttcgttcgaaacgggtatatcttcgcataaaatctagacagaagcattctcagaaaatactttgtgatgattgagtttaaatcacagagctgaccattcctttggatggagcaggtttgagacacactttttgtagaatctacaagtggatatttggacctctctgaggatttcgttggaaacgggataactgcacctaactaaacggaagcattctcagaaactgctttgtgatgattgcattcacctcacagagttgaacattcctattgatagagcagtttggaaacactcttgttgtggaatgtgcaagtggagatttggagcgctttgaggcctatggtagtaaagggaatagcttcatagaaaaactagacagatgcattctcaggaactttttggtgatgtttgtattcaactcccagagttgaactttcctttggaaagagcagctatgaaacactctttttctagaatctgcaagtggacgtttggagggctttgtggtttgtggtggaaaaggaaatatcttcacctaaatactagatagaagcattctcagaagcttctctgtgatgactgcattcaactcacggagttgaacactccttttgagagcgcagttttgaaactctctttctgtggcatctgcaaggggacatgtagacctctttgaagatttcgttggaaacggaatcatcttcacataaaaactatacagaagcagtctcagaatcttctttgtgatgtttgcattcaaatcccagagttgaactttcctttcaaagttcacgtttgaaacactctttttgcaggatctacaagtggatatttggaccactctgtgtccttcgttcgaaacgggtatatcttcacacgacatctagacagaagctttctcagaaaattctttgggatgattgagtggaactcacagagctgaacattccttgcgatgtagcagtttagaaacacactttctgcagaatctgcaagtgcatatttggacctctctgaggaattcgttggaaacgggataatttcagctgactaaacagaagcattctcagaaccttcttcgtgatgtctgcattcaactcacagtgtggaacctttctttgatagttcaggtttgaaacactctttttgtagaaactgcaaggggataattgcacttctttgaggcctaccgtagtaaaggaaataacttcctatagaaagaagacagaagcattctcagaaccctcttcgtgatgtttgcattcaactcacagtgctgaacctttctttgatagttcagctttgaaacactcttcttgtagaaactgcaagtggatatttggtcctctctgaggatttcgttggaaacgggataaaccgcacagaactaaacagaagcattctcagaaccttcttcgtgatgtttgcattcaactcacagtgttgaacctttctttgatagctcaggtttgaaacggtctttctgtagaaactgcaagtagatatttggacctctctgaggatttcgttggaaacgggataacccgcacagaactaaaacagaagcattcacagaaaactcttggtgacgactgagtttaactcacagagctgaacattcctttggatggagcagtttcgaaacacactatttgtagaatgtgcaagtggatatttgggcctctctgaggatttcgttggaaacgggataaaccgcacagaactaaacagaagcattctcagaaactactttgtgatgattgcattcaagtcacagagttgaacattccctttgacagagcagtttggaaactctctttctgtagaatctgcaagtggagatatggaccgctttgaggcctatggtagtaaaggaaatagcttcatataaaagctagacagtagcattctcagaaacttctttgtgatgcttgcattcaactcacagagttgaactttcctttcgagagagaagctttgaaacactctttttccagaatctgcaagtggacatttggagggctttgaggcctgtggtggaaaaggaattatcttcccgtaaaagctagatagaagcattgtcagaaacttctttgtgatgattgcattcaagtcacagagttgaaggttccttttcaaagagcagtttccaatcactctttctgtggaatctgcaagtggatatttggacctctttgaagatttcgttggaaacgggagaatcttcacagaaaagctaaacagaagcattctcagaaacttctctgtgatgtttgtgttcaactcccagagtttcacattgcttctcatagagtagttctgaaacatgcttttcgtagtgtctgcaagtggacatttggagcgctttcaggcctgtggtggaaaacgaattatggtcacataaaaactggagagaagcattgtcagaaacttctttgtgatgattgcattcaactcacagggttgaaggttccttttcaaagagcagtttccaatcactctttctgtggaatctgcaagtggatatttggacctctttgaagatttcgttggaaacgggagaatcttcacagaaaagctaaacagaagcattctcagaaacttctctgtgatgtttgtgttcaactcccagagtttcacattgcttttcatagagtagttctgaaacatgcttttcgtagtgtctacaagtggacatttggagcgctttcaggcctgtggtggaaaacgaattatggtcacataaaaactggagagaagccttctcagaaacttctctgtgatgattgcattcaactcacagatttgaaccctcctatggatagagcattgttgaaactctctttttgtggaatctgcaagtggatatgtggacctctccgaagatgtctttggaaacgggaatatcttcacataaaaactaaacagaagcattctcagaaacttcttggtgatgtttgcattcaaatcccagagttgaaccttcctgtgatagttcaggtttgaaacactctttttgtaggatctgcaagtggatatttggaccactctgtggccttcgttcgaaacgggtacatcttcacataaaatctagacagaagcattctcagaaaatactttgtgatgattgagtttaactcacagagctgaacattcctttggatggagcaggtttgagacacactttttgtagaatctacaagtggatatttggacctctctgaggatttcgttggaaacgggataactgcacctaactaaacggaagcattctcagaaactgctttgtgatgattgcattcacctcacagagttgaacattcctattgatagagcagtttggaaacactcttgttgtggaatgtgcaagtggagatttggagcgctttgaggcctatggtagtaaagggaatagcttcatagaaaaactagacagatgcattctcaggaactttttggtgatgtttgtattcaactcccagagttgaactttcctttggaaagagcagctatgaaacactctttttctagaatctgcaagtggacgtttggagggctttgtggtttgtggtggaaaaggaaatatcttcacctaaatactagatagaagcattctcagaagcttctctgtgatgactgcattcaactcacggagttgaacactccttttgagagcgcagttttgaaactctctttctgtggcatctgcaaggggacatgtagacctctttgaagatttcgttggaaacggaatcatcttcacataaaaactatacagaagcagtctcagaatcttctttgtgatgtttgcattcaaatcccagagttgaactttcctttcaaagttcacgtttgaaacactctttttgcaggatctacaagtggatatttggaccactctgtgtccttcgttcgaaacgggtatatcttcacacgacatctagacagaagctttctcagaaaattctttgggatgattgagtggaactcacagagctgaacattccttgcgatgtagcagtttagaaacacactttctgcagaatctgcaagtgcatatttggacctctctgaggaattcgttggaaacgggataatttcagctgactaaacagaagcattctcagacacccttcttcgtgatgtctgcattcaactcacagtgtggaacctttctttgatagttcaggtttgaaacactctttttgtagaaactgcaaggggataattgcacttctttgaggcctaccgtagtaaaggaaataacttcctatagaaagaagacagaagcattctcagaaccctcttcgtgatgtttgcattcaactcacagtgctgaacctttctttgatagttcagctttgaaacactcttcttgtagaaactgcaagtggatatttggtcctctctgaggatttcgttggaaacgggataaaccgcacagaactaaacagaagaattctcagagccctcttcgtgatgtttgcattcaactcacagtgctgaacctttctttgatagtgcagctttgaaacactctttttgtagaaactgcaagtggatgtttggtcctctctgaggatttcgttggaaacgggataaaccgcacagaactaaaacagaagcattgtcagaaacttctttgtgatgattgcattcaactcacagagttgaaggttccttttcaaacagcagtttccaatcactctttctgtggaatctgcaagtggatatttgggcctctctgaggatttcgttggaaacgggataaaacgcacagaactaaaacagaagcattctcagaaacttctctgtgatgtttgtgttcaactcccagagtttcacgttgcttttcatagagtagttctgaaacatgcttttcgtagtgtctgcaagtggacatttggagcgctttcaggcctgtggtggaaaacgaattatggtcacataaaaactggagagaagccttctcagaaacttctctgtgatgattgcattcaactcacagagttgaaccctcctatggatagagcagtgttgaaactctctttttgtggaatctgcaagtggatatgtggacctctccgaagatgtctttggaaacgggaatatcttcacataaaaactaaacagaagcattctcagaaacttcttggtgatgtttgcattcaaatcccagagttgaaccttcctttgatagttcaggtttgaaacactctttctgtaggatctgcaagtggctatttggaccactctgtggccttcgttcgaaacgggtatatcttcgcataaaatctagacagaagcattctcagaaaatactttgtgatgattgtgtttaaatcacagagctgaccattcctttggatggagcaggtttgagacacactttttgtagaatctacaagtggatatttggacctctctgaggatttcgttggaaacgggataagtgcacctaactaaacggaagcattctcagaaactgctttgtgatgattgcattcacctcacagagttgaacattcctattgatagagcagtttggaaacactcttgttgtggaatgtgcaagtggagatttggagcgctttgaggcctatggtagtaaagggaatagcttcatagaaaaactagacagatgcattctcaggaactttttggtgatgtttgcattcaactcccagagttgaactttcctttggaaagagcagctatgaaacactctttttctagaatctgcaagtggacgtttggagggctttgtggtttgtggtggaaaaggaaatatcttcacctaaatactagagagaagcattctcagaagcttctctgtgatgactgcattcaactcacggagttgaacactccttttgagagcgcagttttgaaactctctttctgtggcatccgcaaggggacatgtagacctctttgaagatttcgttggaaacggaatcatcttcacataaaaactatacagaagcagtctcagaatcttctttgtgatgtttgcattcaaatcccagagttgaactttcctttccaagttcacgtttgaaacagtctttttgcaggatctacaagtggatatttggaccactctgtgtccttcgttcgaaacgggtatatcttcacatgacatctagacagaagctttctcagaaaattctttgggatgattgagtggaactcacagagctgaacattccttgcgatgtagcagtttagaaacacactttctgcagaatctgcaagtgcatatttggacctctctgaggaattcgttggaaacgggataatttcagctgactaaacagaagcattctcagaacgttcttcttgatgtctgcattcaactcacagtgtggaaccttcctttgattgttcaggtttgaaacactctttttgtagaaactgcaaggggataattgcacttctttgaggcctaccgtagtaaaggaaataacttcctatagaaagaagacagaagcattctcagaaccctcttcgtgatgtttgcattcaactcacagtgctgaacctttctttgatagttcagctttgaaacactcttcttgtagaaactgcaagtggatatttggtcctctctgaggatttcgttggaaacgggataaaccgcacagaactaaacagaagaattctcagagccctcttcgtgatgtttgcattcaactcacagtgctgaacctttctttgatagtgcagctttgaaacactctttttgtagaaactgcaagtggatgtttggtcctctctgaggatttcgttggaaacgggataaaccgcacagaactaaaacagaagcattgtcagaaacttctttgtgatgattgcattcaactcacagagttgaaggttccttttcaaacagcagtttccaatcactctttctgtggaatctgcaagtggatatttgggcctctctgaggatttcgttggaaacgggataaaacgcacagaactaaaacagaagcattctcagaaacttctctgtgatgtttgtgttcaactcccagagtttcacgttgcttttcatagagtagttctgaaacatgcttttcgtagtgtctgcaagtggacatttggagcgctttcaggcctgtggtggaaaacgaattatggtcacataaaaactggagagaagccttctcagaaacttctctgtgatgattgcattcaactcacagagttgaaccctcctatggatagagcagtgttgaaactctctttttgtggaatctgcaagtggatatgtggacctctccgaagatgtctttggaaacgggaatatcttcacataaaaactaaacagaagcattctcagaaacttcttggtgatgtttgcattcaaatcccagagttgaaccttcctttgatagttcaggtttgaaacactctttttgtaggatctgcaagtggctatttggaccactctgtggccttcgttcgaaacgggtatatcttcgcataaaatctagacagaagcattctcagaaaatactttgtgatgattgagtttaaatcacagagctgaacattcctttggatggagcaggtttgagacacactttttgtagaatctacaagtggatatttggacctctctgaggatttcgttggaaacgggataactgcacctaactaaacggaagctttctcagaaactgctttgtgatgattgcattcacctcacagagttgaacattcctattgatagagcagtttggaaacactcttgttgtggaatgtgcaagtggagatttggagcgctttgaggcctatggtagtaaagggaatagcttcatagaaaaactagacagaatgcattctcaggaactttttggtgatgtttgtattcaactcccagagttgaactttcctttggaaagagcagctatgaaacactctttttctagaatctgcaagtggacgtttggagggctttgtggtttgtggtggaaaaggaaatatcttcacctaaatactagacagaagcattctcagaagcttctctgtgatgactgcattcaactcacggagttgaacactccttttgagagcgcagttttgaaactctctttctgtggcatctgcaaggggacatgtagacctctttgaagatttcgttggaaacggaatcatcttcacataaaaactatacagaagcagtctcagaatcttctttgtgatgtttgcattcaaatcccagagttgaactttcctttcaaagttcacgtttgaaacactctttttgcaggatctacaagtggatatttggaccactctgtgtccttcgttcgaaacgggtatatcttcacatgacatctagacagaagctttctcagaaaattgtttgggatgattgatttgaactcacagagctgagcattcctttggatggagcagtttcgaaacacactatttgtagaatgtgcaagtggatatgtgggcctctctgaggatttcgttggaaacgggataaaccgcacagaactaaacagaagcattctcagaaccttcttcgtgatgtctgcattcaactcacagtgtggaacctttctttgatagttcaggtttgaaacactctttttgtagaaactgcaaggggataattgcactctttgaggagtaccgtagtaaaggaaataacttcctataaaaagaagacagaagcattctcagaaccctcttcgtgatgtttgcattcaactcacagtgctgaacctttctttgatagttcagctttgaaacactctttttgtagaaactgcaagtggatatttggtcctctctgagcatttcgttggaaacgggataaactgcacagaactaaacagaagcattctcagaaccttcttcgtgatgtttgcattcaactcacagtgttgaacctttctttgatagttcaggtttgaaacggtctttctgtagaaactgcaagtagatatttggacctctctgaggatttcgttggaaacgggataacccgcacagaactaaaacagaagcattcacagaaaactcttggtgacgactgagtttaactcacagagctgaacattcctttggatggagcagtttcgaaacacactatttgtagaatgtgcaagtggatatttaggcctctctgaggatttcgttggaaacgggataaaccgcacagaactaaacagaagcattctcagaaactactttgtgatgattgcattcaagtcacagagttgaacattccctttgacagagcagtttggaaactctctttgtgtagaatctgcaagtggagatacggaccgctttgaggcctatggtagtaaaggaaatagcttcatataaaagctagacagtagcattctcagaaacttctttgtgatgcttgcattcaactcacagagttgaactttcctttcgagagagaagctttgaaacactctttttccagaatctgcaagtggacatttggagggctttgaggcctgtggtggaaaaggaattatcttcccgtaaaagctagatagaagcattgtcagaaacttctttgtgatgattgcattcaactcacagagttgaaggttccttttcaaagagcagtttccaatcactctttctgtggaatctgcaagtggatatttggacctattttgaagatttcgttggaaacgggagaatcttcacaggaaagctaaacagaagcattctcagaaacttctctgtgatgtttgtgttcaactcccagagtttcacattgcttttcatagagtagttctgaaacatgcttttcgtagtgtctacaagtggacatttggagcgctttcaggcctgtggtggaaaacgaattatggtcacataaaaactggagagaagccttctcagaaacttctctgtgatgattgcattcaactcacagagttgaaccctcctatggatagagcagtgttgaaactctctttttgtggaatctgcaagtggatatgtggacctctccgaagatgtctttggaaacgggaatatcttcacataaaaactaaacagaagcattctcagaaacttcttggtgatgtttgcattcaaatcccagcagttgaaccttcctttgatagttcaggtttgaaacactctttctgtaggatctgcaagtggctatttggaccactctgtggccttcgttcgaaacgggtatatcttcgcataaaatctagacagaagcattctcagaaaatactttgtgatgattgagtttaactcacagagctgaacattcctttggatggagcaggtttgagacacacatttgtagaatctacaagtggatatttggacctctctgaggatttcgttggaaacgcgataactgcacctaactaaacggaagcattctcagaaactgctttgtgatgattgcattcacctcacagagttgaacattcctattgatagagcagtttggaaacactcttcatctggaatgtgcaagtggagatttggagcgctttgaggcctatggtagtaaagggaatagcttcatagaaaaactagacagatgcattctcaggaactttttggtgatgtttgtattcaactcccagagttgaactttcctttggaaagagcagctatgaaacactctttttctagaatctgcaagtggacgtttggagggctttgtggtttgtggtggaaaaggaaatatcttcacctaaatactagatagaagcattctcagaagcttctctgtgatgactgcattcaactcacggagttgaacactccttttgagagcgcagttttgaaactctgtttctgtggcatctgcaaggggacatgtagacctctttgaagatttcgttggaaacggaatcatcttcacataagaactatacagaagcagtctcagaatcttctttgtgatgtttgcattcaaatcccagagttgaactttcctttcaaagttcacgtttgaaacactctttttgcaggatctacaagtggatatttggaccactctgtgtccttcgttcgaaacgggtatatcttcacatgacatctagacagaagctttctcagaaaattctttgggatgattgagtggaactcacagagctgaacattccttgcgatgtagcagtttagaaacacactttctgcagaatctgcaagtgcatatttggacctctctgaggaattcgttggaaacgggataatttcagctgactaaacagaagcattctcagaaccttcttcgtgatgtctgcattcaactcacagtgtggaacctttccttgttagttcaggtttgaaacactctttttgtagaaactgcaaggggataattgcacttctttgaggcctaccgtagtaaaggaaataacttcctatagaaagaagacagaagcattctcagaaccctcttcgtgatgtttgcattcaactcacagtgctgaacctttctttgatagttcagctttgaaacactcttcttgtagaaactgcaagtggatatttggtcctctctgaggatttcgttggaaacgggataaaccgcacagaactaaacagaagaattctcagagccctcttcgtgatgtttgcattcaactcacagtgctgaacctttctttgatagtgcagctttgaaacactctttttgtagaaactgcaagtggatgtttggtcctctctgaggatttcgttggaaacgggataaaccgcacagaactaaaacagaagcattgtcagaaacttctttgtgatgattgcattcaactcacagagttgaaggttccttttcaaacagcagtttccaatcactctttctgtggaatctgcaagtggatatttgggcctctctgaggatttcgttggaaacgggataaaacgcacagaactaaaacagaagcattctcagaaacttctctgtgatgtttgtgttcaactcccagagtttcacgttgcttttcatagagtagttctgaaacatgcttttcgtagtgtctgcaagtggacatttggagcgctttcaggcctgtggtggaaaacgaattatggtcacataaaaactggagagaagccttctcagaaacttctctgtgatgattgcattcaactcacagagttgaaccctcctatggatagagcagtgttgaaactctctttttgtggaatctgcaagtggatatgtggacctctccgaagatgtctttggaaacgggaatatcttcacataaaaactaaacagaagcattctcagaaacttcttggtgatgtttgcattcaaatcccagagttgaaccttcctttgatagttcaggtttgaaacactctttctgtaggatctgcaagtggctatttggaccactctgtggccttcgttcgaaacgggtatatcttcgcataaaatctagacagaagcattctcagaaaatactttgtgatgattgagtttaactcacagagctgaacattcctttggatggagcaggtttgagacacaccttttgtagaatctacaagtggatatttggacctctctgaggatttcgttggaaacgggataactgcacctaactaaacggaagcattctcagaaactgctttgtgatgattgcattcacctcacagagttgaacattcctattgatagagcagtttggaaacactcttgttgtggaatgtgcaagtggagatttggagcgctttgaggcctgtggtagtaaagggaatagcttcatagaaaaactagacagatgcattctcaggtactttttggtgatgtttgtattcaactcccagagttgaactttcctttggaaagagcagctatgaaacactctttttctagaatctgcaagtggacgtttggagggctttgtggtttgtggtggaaaaggaaatatcttcacctaaatactagatagaagcattctcagaagcttctctgtgatgactgcattcaactcacggagttgaacactccttttgagagtgcagttttgaaactctctttctgtggcatctgcaaggggacatgtagacctctttgaagatttcgttggaaacggaatcatcttcacataaaaactatacagaagcagtctcagaatcttctttgtgatgtttgcattcaaatccctgagttgaattttcctttcaaagttcacgtttgaaacactctttttgcaggatctacaagtggatatttggaccactctgtgtccttcgttcgaaacgggtatatcttcacatgacatctagacagaagctttctcagaaaattctttgggatgattgagttgagcaaacagagctgaacactccttgtgatgtagcagtttagaaacacactttctgcagaatctgcaagtgcatatgtggacctctctgaggaattcgttggaaacgggataatttcagctgactaaacagaagcattctcagaaccttcttcgtgatgtctgcattcaactcacagtgtggaacctttctttgatagttcaggtttgaaacactctttttgtagaaactgcaaggggatcattgcacttctttgaggcctaccgtagtaaaggagataacttcctataaaaagaagacagaagaattctcagagccctcttcgtgatgttcggcattcaactcacagtgctgaacctttctttgatagtgcagctttgaaacactctttttgtagaaactgcaagtggatgtttggtcctctctgaggatttcgttggaaacgggataaaccgcacagaactaaaacagaagcattctctgaaccttcttcgtgatgtttgcattcaactcacagtgttgaacctttctttgatagttcaggttggaaacggtctttctgtagaaactgcaagtagatatttggacctctctgaggatttcgttggaaacgggataaaccgcacagaactaaaacagaagcattcacagaaaactcttggtgacgactgagtttaactcacagagctgaacattcctttggatggagcagtttcgaaacacactatctgtagaatgtgcaagtggatattggggcctctctgaggatttcgttggaaacgggataaaccgcacagaactaaacagaaacattctcagaaactactttgtgatgattgcattcaagtcacagagttgaacattccctttgacagagcagtttggaaactctctttgtgtagaatctgcaagtggagatatggaccgctttgaggcctatggtagtaaaggaaatagcttcatataaaagctagacagtagcattctcagaaacttctttgtgatgcttgcattcaactcacagagttgaactttcctttcgagagagaagctttgaaacactctttttccagaatctgcaagtggacatttggagggctttgaggcctgtggtggaaaaggaattatcttcccgtaaaagctagatagaagcattgtcagaaacttctttgtgatgattgcattcaactcacagagttgaaggttcctttccaaacagcagtttccaaacactctttctgtggaatctgcaagtggatatttggacctctttgaagatttcgttggaaacgggagaatcttcacagaaaagctaaacagaagcattctcagaaacttctctgtgatgtttgtgttcaactcccagagtttcacattgcttttcatagagtagttctgaaacatgcttttcgtagtgtctacaagtggacatttggagcgctttcaggcctgtggtggaaaacgaattatggtcacataaaaactggagagaagcattctcagaaaatactttgtgatgattgagtttaactcacagagctgaacattcctttggatggagcaggtttgagacacactttttgtagaatctacaagtggatatttggacctctctgaggatttcgttggaaacgcgataactgcacctaactaaacggaagcattctcagaaactgctttgtgatgattgcattcacctcacagagttgaacattcctattgatagagcagtttggaaacactcttgttgtggaatgtgcaagtggagatttggagcgctttgaggcctatggtagtaaagggaatagcttcatagaaaaactagacagatgcattctcaggaactttttggtgatgtttgtattcaactcccagagttgaactttcctttggaaagagcagctatgaaacactgtttttctagaatctgcaagtggacgtttggagggctttgtggtttgtggtggaaaaggaaatatcttcacctaaatactagagagaagcattctcagaagcttctctgagatgactgcattcaactcacggagttgaacactccttttgagagcgcagttttgaaactctctttctgtggcatctgcaaggggacatgtagacctctttgaagatttcgttggaaacggaatcatcttcacataaaaactatacagaagcagtctcagaatcttctttgtgatgtttgcattcaaatcccagagttgaactttcctttcaaagttcacgtttgaaacactctttttgcaggatctacaagtggatatttggaccactctgtgtccttcgttcgaaacgggtatatcttcacaggacatctagacagaagctttctcagaaaattctttgggatgattgagttgaactcacagagctgaacattccttgcgatgtagcagtttagaaacacactttctgcagaatctgcaagtgcatatttggacctctctgaggaattcgttggaaacgggataatttcagctgactaaacagaagcattctcagaaccttcttcgtgatgtctgcattcaactcacagtgtggaagctttctttgatagttcaggtttgaaacactctttttgtagaaactgcaaggggataattgcactgctttgaggcctaccgtagtaaaggaaataacttcctataaaaagaagacagaagcattctcagaaccctcttcgtgatgtttgcattcaactcacagtgctgaacctttctttgatagttcagctttgaaactctcttcttgtagaaactgcaagtggatatttggtcctctctgaggatttcgttggaaacgggataaaccgcacagaactaaacagaagaattctcagaaccctcttcgtgatgtttgcattcaactcacagtgctgaacctttctttgatagtgcagctttgaaacactctttttgtagaaactgcaagtggatatttggtcctctctgaagatttcgttggaaacgggataaaccgcacagaactaaaacagaagcattcacagaaaactcttggtgacgactgagtttaactcacagagctgaacattcctttggatggagcagtttcgaaacacactatttgtagaatctgcaagtggatatttgggcctctctgaggatttcgttggaaacgggataaaacgcacagaactaaaacagaagcattctcagaaactactttgtgatgattgcattcaagtcacagagttgaacattccctttgacagagcagtttggaaactctctttgtgtagaatctgcaagtggagatatggaccgctttgaggcctatggtagtaaaggaaatagcttcatataaaagctagacagtagcattctcagaaacttctttgtgatgcttgcattcaactcacagagttgaactttcctttcgagagagaagctttgaaacactctttttccagaatgtgcaagtggacatttggggagctttgaggcctgtggtggaaaaggaattatcttcccgtaaaagctagatagaagcattgtcagaaacttctttgtgatgattgcattcaactcacagagttgaaggttccttttcaaacagcagtttccaatcactctttctgtggaatctgcaagtggatatttggacctctttgaagatttcgttggaaacgggagtatcttcacagaaaagctaaacagaagcattctcagaaacttctctgtgatgtttgtgttcaactcccagagtttcacattgcttttcatagagtagttctgaaacatgcttttcgtagtgtctacaagtggacatttggagcgctttcaggcctgtggtggaaaacgaattatggtcacataaaaactggagagaagccttctcagaaacttctctgtgatgattgcattcaactcacagagttgaaccctcctatggatagagcagtgttgaaactctctttttgtggaatctgcaagtggatatgtggacctctccgaagatgtctttggaaacgggaatatcttcacataaaaactaaacagaagcattctcagaaacttcttggtgatgtttgcattcaaatcccagagttgaaccttcctttgatagttcaggtttgaaacactctttttgtaggatctgcaagtggatatttggaccactctgtggccttcgttcgaaacgggtatatcttcgcataaaatctagacagaagcattctcagaaaatactttgtgatgattgagtttaactcacagagctgaacattcctttggatggagcaggtttgagacacaccttttgtagaatctacaagtggatatttggacctctctgaggatttcgttggaaacgggataactgcacctaactaaacggaagcattctcagaaactgctttgtgatgattgcattcacctcacagagttgaacattcctattgatagagcagtttggaaacactcttgttgtggaatgtgcaagtggagatttggagcgctttgaggcctatggtagtaaagggaatagcttcatagaaaaactagacagatgcattctcaggaactttttggtgatgtttgtattcaactcccagagttgaactttcctttggaaagagcagctatgaaacactctttttctagaatctgcaagtggacgtttggagggctttgtggtttgtggtggaaaaggaaatatcttcacctaaatactagatagaagcattctcagaagcttctctgtgatgactgcattcaactcacggagttgaacactccttttgagagcgcagttttgaaactctctttctgtggcatctgcaaggggacatgtagacctctttgaagatttcgttggaaacggaatcatcttcacataaaaactatacagaagcagtctcagaatcttctttgtgatgtttgcattcaaatcccagagttgaacttgcctttcaaagttcacgtttgaaacactctttttgcaggatctacaagtggatatttggaccactctgtgtccttcgttcgaaacgggtatatcttcacatgacatctagacagaagctttctcagaaaattctttgggatgattgagtggaactcacagagctgaacattccttgcgatgtagcagtttagaaacacactttctgcagaatctgcaagtgcatatttggacctctctgaggaattcgttggaaacgggataatttcagctgactaaacagaagcattctcagaaccttcttcgtgatgtctgcattcaactcacagtgtggaacctttctttgatagttcaggtttgaaacactctttttgtagaaactgcaaggggataatggcacttctttgaggcctaccgtagtaaaggaaataacttcctatagaaagaagacagaaccattctcagaaccctcttcgtgatgtttgcattcaactcacagtgctgaacctttctttgatagttcagctttgaaacactcttcttgtagaaactgcaagtggatatttggtcctctctgaggatttcgttggaaacgggataaaccgcacagaactaaacagaagaattctcagaaccctcttcgtgatgtttgcattcaactcacactgctgaacctttctttgatagttcagctttgaaacactctttttgtagaaactgcaagtggatatttggtcctctctgaggatttcgttggaaaagggataaaccgcacagaactaaacagaagcattcacagaaaactcttggtgacgactgagtttaactcacagagctgaacattcctttggatggagcagtttcgaaacacactctttgtagaatctgcaagtggatatttgggcctctctgaagatttcgttggaaatgggataaaccgcacagaactaaaacagaagcattctcagaaactacttcgtgatgattgcattcaagtcacagagcagaacattccctctgacagagcagtttggaaactctctttgtgtagcatctgcaagtggagatatggaatgctttgaggactatggtagtaaaggaaatagcttcatataaaagctagacagtagcattctcagaaacttctttgtgatgcttgcattcaactcacagagttgaactttcctttcgagagagaagcttcgaaacactctttttccagaatctgcaagtggacatttggagggctttgaggcctgtggtggaaaaggaattatcttcccgtaaaagctagatagaagcattgtcagaaacttctttgtgatgattgcattcaactcacagagttgaaggttccttttcaaacagcagtttcaaacactctttctgtggaatctgcaagtggatgtttggacctctttgaagatttcgttggaaacgggagaatcttcacagaaaagctaaacagaagcattctcagaaacttctctgtgatgtttgtgttcaactcccagagattcacattgcttttcatagagtagttctgaaacatgcttttcgtagtgtctgcaagtggacatttggagcgctttcaggcctgtggtggaaaacgaattatggtcacataaaaactggagagaagccttctcagaaacttctctgtgatgattgcattcaactcacagagttgaaccctcctatggatagagcagtgttgaaactctctttttgtggaatctgcaagtggatatgtggacctctccgaagatgtctttggaaacgggaatatcttcacataaaaactaaacagaagcattctcagaaacttcttggtgatgtttgcattcaaatcccagagttgaaccttcctttgatagttcaggttggaaacactcattttgtaggatctgcaagtggatatttggaccactctgtggccttcgttcgaaacgggtacatcttcgcataaaatctagacagaagcattctcagaaaatactttgtgattgattgagttgaactcacagagctgaacattcctttggatggagcaggtttgagacacactttttgtagaatctacaagtggatatttggacctctctgaggatttcgttggaaacgggataactgcacctaactaaacggaagcattctcagaaactgctttgtgatgattgcattcacctcacagagttgaacattcctattgatagagcagtttggaaacactcttgttgtggaatgtgcaagtggagatttggagcgctttgaggcctgtggtagtaaagggaatagcttcatagaaaaactagacagatgcattctcaggaactttttggtgatgtttgtattcaactcccagagttgaactttcctttggaaagagcagctatgaaacactctttttctagaatctgcaagtggacgtttggagggctttgtggtttgtggtggaaaaggaaatatcttcacctaaatactagatagaagcattctcagaagcttctctgtgatgactgcattcaactcacggagttgaacactccttttgagagcgcagttttgaaactctctttctgtggcatctgcaaggggacatgtagacctctttgaagatttcgttggaaacggaatcatcttcacataaaaactatacagaagcagtctcagaatcttctttgtgatgtttgcattcaaatcccagagttgaactttcctttcaaagttcacgtttgaaacactctttttgcaggatctacaagtggatatttggaccactctgtgtccttcgttcgaaacgggtataacttcacacgacatctagacagaagctttctcagaaaattctttgggatgattgagtggaactcacagagctgaacattccttgcgatgtagcagtttagaaacacactttctgcagaatctgcaagtgcatatttggacctctctgaggaattcgttggaaacgggataatttcagctgactaaacagaagcattctcagaaccttcttcgtgatgtctgcattcaactcacagtgtggaacctttctttgatagttcaggtttgaaacactctttttgtagaaactgcaaggggataattgcacttctttgaggcctaccgtagtaaaggaaataacttcctatagaaagaagacagaagcattctcagaaccctcttcgtgatgtttgcattcaactcacagtgctgaacctttctttgatagttcagctttgaaacactcttcttgtagaaactgcaagtggatatttggtcctctctgaggatttcgttggaaacgggataaaccgcacagaactaaacagaagaattctcagagccctcttcgtgatgtttgcattcaactcacagtgctgaacctttctttgatagtgcagctttgaaacactctttttgtagaaactgcaagtggatgtttggtcctctctgaggatttcgttggaaacgggataaaccgcacagaactaaaacagaagcattgtcagaaacttctttgtgatgattgcattcaactcacagagttgaaggttccttttcaaacagcagtttccaatcactctttctgtggaatctgcaagtggatatttgggcctctctgaggatttcgttggaaacgggataaaacgcacagaactaaaacagaagcattctcagaaacttctctgtgatgtttgtgttcaactcccagagtttcacgttgcttttcatagagtagttctgaaacatgcttttcgtagtgtctgcaagtggacatttggagcgctttcaggcctgtggtggaaaacgaattatggtcacataaaaactggagagaagccttctcagaaacttctctgtgatgattgcattcaactcacagagttgaaccctcctatggatagagcagtgttgaaactctctttttgtggaatctgcaagtggatatgtggacctctccgaagatgtctttggaaacgggaatatcttcacataaaaactaaacagaagcattctcagaaacttcttggtgatgtttgcattcaaatcccagagttgagccttcctttgatagttcaggtttgaaacactctttctgtaggatctgcaagtggctatttggaccactctgtggccttcgttcgaaacgggtatatcttcgcataaaatctagacagaagcattctcagaaaatactttgtgatgattgagtttaaatcacagagctgaacattcctttggatggagcaggtttgagacacactttttgtagaatctacaagtggatatttggacctctctgaggatttcgttggaaacgggataactgcacctaactaaacggaagcattctcagaaactgctttgtgatgattgcattcacctcacagagttgaacattcctattgatagagcagtttggaaacactcttgttgtggaatgtgcaagtggagatttggagcgctttgaggtctatggtagtaaagggaatagcttcatagaaaaactagacagatgcattctcaggaactttttggtgatgtttgtattcaactcccagagttgaactttcctttggaaagagcagctatgaaacactctttttctagaatctgcaagtggacgtttggagggctttgtggtttgtggtggaaaaggaaatatcttcacctaaatactagatagaagcattctcagaagcttctctgtgatgactgcattcaactcacggagttgaacactccttttgagagcgtagttttgaaactctctttctgtggcatctgcaaggggacatgtagacctctttgaagatttcgttggaaacggaatcatcttcacataaaaactatacagaagcagtctcagaatcttctttgtgatgtttgcattcaaatcccagagttgaactttcctttcaaagttcacgtttgaaacactctttttgcaggatctacaagtggatatttggaccactctgtgtccttcgttcgaaacgggtatatcttcacaggacatctagacagaagctttctcagaaaattctttgggatgattgagtggaactcacagagctgaacattccttgcgatgtagcagtttagaaacacactttctgcagaatctgcaagtgcatatttggacctctctgaggaattcgttggaaacgggataatttcagctgactaaacagaagcattctcagaaccttcttcgtgatgtctgcattcaactcacagtgtggaacctttctttgatagttcaggtttgaaacactctttttgtagaaactgcaaggggataattgcacttctttgaggcctaccgtagtaaaggaaataacttcctatagaaagaagacagaagcattctcagaaccctcttcgtgatgtttgcattcaactcacagtgctgaacctttctttgatagttcagctttgaaacactcttcttgtagaaactgcaagtggatatttggtcctctctgaggatttcgttgtaaacgggataaaccgcacggaaataaacagaagaattctcagagccctcttcgtgatgtttgcattcaactcacagtgctgaacctttctttgatagtgcagctttgaaacactctttttgtagaaactgcaagtggatatttggtcctctctgaggatttcgttggaaacgggataaaccgcacagaactaaaacagaagcattcacagaaaactcttggtgacgactgagtttaactcacagagctgaacattcctttggatggagcagtttcgaaacacactatttgtagaatgtgcaagtggatatttgggcctctctgaggatttcgttggaaacgggataaaacgcacagaactaaaacagaagcattctcagaaactactttgtgatgattgcattcaagtcacagagttgaacattccctttgacagagcagtttggaaactctctttgtgtagaatctgcaagtggagatatggaccgctttgaggcctatggtagtaaaggaaatagcttcatataaaagctagacagtagcattctcagaaacttctttgtgatgcttgcattcaactcacagagttgaacttccctttcgagagagaagctttgaaacactctttttccagaatgtgcaagtggacatttggagggctttgaggcctgtggtggaaaaggagttatcttcccgtaaaagctagatagaagcattgtcagaaacttctttgtgatgattgcattcaactcacagagttgaaggttccttttcaaacagcagtttccaatcactctttctgtggaatctgcaagtggatatttcgacctctttgaagatttcgttggaaacgggagaatcttcacagaaaagctaaacagaagcattctcagaaacttctctgtgatgtttgtgttcaactcccagagtttcacgttgcttctcatagagtagttctgaaacatgcttttcgtagtgtctgcaagtggacatttggagcgctttcaggcctgtggtggaaaacgaattatggtcacataaaaactggagagaagccttctcagaaacttctctgtgatgattgcattcaactcacagagttgaaccctctatggatagagcagtgttgaaactctctttttgtggaatctgcaagtggatatgtggacctctccgaagatgtctttggaaacgggaatatcttcacataaaaactaaacagaagcattctcagaaacttcttggtgatgtttgcattcaaatcccagagttgaaccttcctttgatagttcaggtttgaaacactctttttgtaggatctgcaagtggatatttggaccactctgtggccttcgttcgaaacgggtatatcttcgcataaaatctagacagaagcattctcagaaaatactttgtgatgattgagttgaactcacagagctgaacattcctttggatggagcaggtttgagacacactttttgtagaatctacaagtggatatttggacctctctgaggatttcgttggaaacgggataactgcacctaactaaacggaagcattctcagaaactgctttgtgatgattgcattcacctcacagagttgaacattcctattgatagagcagtttggaaacactcttgttgtggaatgtgcaagtggagatttggagcgctttgaggcctatggtagtaaagggaatagcttcatagaaaaactagacagatgcattctcaggaactttttggtgatgtttgtattcaactcccagagttgaactttcctttggaaagagcagctatgaaacactctttttctagaatctgcaagtggacgtttggagggctttgtggtttgtggtggaaaaggaaatatcttcacctaaatactagatagaagcattctcagaagcttctctgtgatgactgcattcaactcacggagttgaacactccttttgagagcgtagttttgaaactctctttctgtggcatctgcaaggggacatgtagacctctttgaagatttcgttggaaacggaatcatcttcacataaaaactatacagaagcagtctcagaatcttctttgtgatgtttgcattcaaatcccagagttgaactttcctttcaaagttcacgtttgaaacactctttttgcaggatctacaagtggatatttggaccactctgtgtccttcgttcgaaacgggtatatcttcacatgacatctagacagaagctttctcagaaaattctttgggatgattgagttgagcaaacagagctgaacactccttgcgatgtagcagtttagaaacacactttctgcagaatctgcaagtgcatatgtggacctctctgaggaattcgttggaaatgggataatttcagctgactaaacagaagcattctcagaaccttcttcgtgatgtctgcattcaactcacagtgtggaacctttctttgatagttcaggtttgaaacactctttttgtagaaactgcaaggggatcattgcacttctttgaggcctaccgtagtaaaggagataacttcctataaaaagaagacagaagcattcacagaaaactcttggtgacgactgagtttaactcacagagctgaacattcctttggatggagcagtttcgaaacacactatttgtagaatgtgcaagtggatatgtgggcctctctgaggatttcgttggaaacgggataaaccgcacagaactaaacagaagcattctcagaaaatactttgtgatgattgcattcaagtcacagagttgaacattccctttgacagagcagtttggaaaatctctttgcgtagaatctgcaagtggagatatggaccgctttgaggcctatggtagtaaaggaaatagcttcatataaatgctagacagcagcattctcagaaacttctttgtgatgcttgcattcaactcacagagttgaactttcctttcgagagagaagctttgaaacactctttttccagaatctgcaagtggacatttggagggctttgaggcctgtggtggaaaaggaattatcttcccgtaaaagctagatagaagcattgtcagaaacttctttgtgatgattgctttcaactcacagagttgaaggttccttttcaaacagcagtttccaatcactctttctgtggaatctgcaagtggatatttggacctctttgaagatttcgttggaaacgggagaatgttcacagaaaagctaaacagaagcattctcagaaacttctctgtgatgtttgtgttcaactcccagagtttcacattgcttttcatagagtagttctgaaacatgcttttcgtagtgtctgcaagtggacatttggagcgctttcaggcctgtggtggaaaacgaattatggtcacataaaaactggagagaagccttctcagaaacttctctgtgatgattgcattcaactcacagagttgaaccctcctatggatagagcagtgttgaaactctctttttgtggaatctgcaagtggatatgtggacctctccgaagatgtctttggaaacgggaatatcttcacataaaaactaaacagaagcattctcagaaacttcttggtgatgtttgcattcaaatcccagagttgaaccttcctttgatagttcaggtttgaaacactctttttgtaggatctgcaagtggatatttggaccactctgtggccttcgttcgaaacgggtacatcttcgcaaaaaatctagacagaagcattctcagaaaatactttgtgatgattgagtttaactcacagagctgaacattcctttggatggagcaggtttgagacacactttttgtaggatctacaagtggatatttcgacctctctgaggatttcgttggaaacgggataactgcacctaactaaacggaagcattctcagaaactgctttgtgatgattgcattcacctcacagagttgaccattcctattgatagagcagtttggaaacactcttgttgtggaatgtgcaagtggagatttggagcgctttgaggcctatggtagtaaagggaatagcttcatagaaaaactagacagatgcattctcaggaactttttggtgatgtttgtattcaactcccagagttgaactttcctttggaaagagcagctatgaaacactctttttctagaatctgcaagtggacgattggagggctttgtggtttgtggtggaaaaggaaatatcttcacctaaatactagatagaagcattctcagaagcttctctgtgatgactgcattcaactcacggagttgaacactccttttgagagcgcagttttgaaactctctttctgtggcatctgcaaggggacatgtagacctctttgaagatttcgttggaaacggaatcatcttcacataaaaactatacagaagcagtctcagaatcttctttgtgatgtttgcattcaaatcccagagttgaactttcctttcaaagttcacgtttgaaacactctttttgcaggatctacaagtggatatttggaccactctgtgtccttcgttcgaaacgggtatatcttcacatgacatctagacagaagctttctcagaaaattctttgggatgattgagttgaactcacagagctgagcattccttgcgatgtagcagtttagaaacacactttctgcagaatctgcaagtgcatatttggacctctgtgaggaattcgttggaaacgggataatttcagctgactaaacagaagcattctcagaaccttcttcgtgatgtctgcattcaactcacagtgtggaacctttctttgatagttcaggtttgaaacactctttttgtagaaactgcaaggggataattgcactctttgaggagtaccgtagtaaaggaaataacttcctataaaaagaagacagaagcattctcagaaccctcttcgtgatgtttgcattcaactcacagtgctgaacctttctttgatagttcagctttgaaacactctttttgtagaaactgcaagtggatatttggtcctctctgaggatttcgttggaaacgggataaactgcacagaactaaacagaaagcattctcagaaccttcttcgtgatgtttgcattcaactcacagtgttgaacctttctttgatagttcaggtttgaaacggtctttctgtagaaactgcaagtagatatttggacctctctgaggatttcgttggaaacgggataacccgcacagaactaaaacagaagcattcacagaaaactcttggtgacgactgagtttaactcacagagctgaacattcctttggatggagcagtttcgaaacacactatttgtagaatgtgcaagtggatatttaggcctctctgaggatttcgttggaaacgggataaaccgcacagaactaaacagaagcattctcagaaactactttgtgatgattgcattcaagtcacagagttgaacattccctttgacagagcagtttggaaactctctttgtgtagaatctgcaagtggagatatggaccgttgaggcctatggtagtaaaggaaatagcttcatataaaagttagacagtagcattctcagaaacttctttgtgatgcttgcattcaactcacagagttgaactttcctttcgagagagaagctttgaaacactctttttccagaatctgcaagtggacatttggagggctttgaggcctgtggtggaaaaggaattatcttcccgtaaaagctagatagaagcattgtcagaaacttctttgtgatgattgcattcaactcacagagttgaaggttccttttcaaacagcagtttccaatcactctttctgtggaatctgcaagtggatatttggaccgctttgaagatttcgttggaaacgggagaatcttcacagaaaagctaaacagaagcattctcagaaacttctctgtgatgtttgtgttcaactcccagaatttcacattgcttttcatagagtagttctgaaacatgcttttcgtagtgtctgcaagtggacatttggagcgctttcaggcctgtggtggaaaacgaattatggtcacataaaaactggagagaagccttctcagaaacttctctgtgatgattgcattcaactcacagagttgaaccctccctatggatagagcagtgttgaaactctctttttgtggaacctgcaagtggatatgtggacctctccgaagatgtctttggaaacgggaatatcttcacataaaaactaaacagaagcattctcagaaacttcttggtgatgtttgcattcaaatcccagagttgaaccttcctttgatagttcaggtttgaaacactctttctgtaggatctgcaagtggctatttggaccactctgtggccttcgttcgaaacgggtatatcttcgcataaaatctagacagaaagcattctcagaaaatactttgtgatgattgagtttaaatcacagagctgaacattcctttggatggagcaggtttgagacacactttttgtagaatctacaagtggatatttggacctctctgaggatttcgttggaaacgggataactgcacctaactaaacggaagcattctcagaaactgctttgtgatgattgcattcacctcacagagttgaacattcctattgatagagcagtttggaaacactcttgttgtggaatgtgcaagtggagatttggagcgctttgaggcctatggtagtaaagtgaatagcttcatagaaaaactagacagatgcattctcaggaactttttggtgatgtttgtattcaactcccagagttgaactttcctttggaaagagcagctatgaaacactctttttctagaatctgcaagtggacgtttggagggctttgtggtttgtggtggagaaggaaatatcttcacctaaatactagatagaagcattctcagaagcttctctgtgatgactgcattcaactcacggagttgaacactccttttgagagcgcagttttgaaactctctttctgtggcatctgcaaggggacatgtagacctctttgaagatttcgttggaaaccgaatcatcttcacataaaaactatacagaagcagtctcagaatcttctttgtgatgtttgcattcaaatcccagagttgaactttcctttcaaagttcacgtttgaaacactctttttgcaggatctacaagtggatatttggaccactctgtgtccttcgttcgaaacgggtatatcttcacacgacatctagacagaagctttctcagaaaattctttgggatgattgagtggaactcacagagctgaacattccttgcgatgtagcagtttagaaacacactttctgcagaatctgcaagtgcatatttggacctctctgaggaattcgttggaaacgggataatttcagctgactaaacagaagcattctcagaaccttcttcgtgatgtctgcattcaactcacagtgtggaacctttctttgatagttcaggtttgaaacactctttttgtagaaactgcaaggggataattgcacttctttgaggcctaccgtagtaaaggaaataacttcctatagaaagaagacagaagcattctcagaaccctcttcgtgatgtttgcattcaactcacagtgctgaacctttctttgatagttcagctttgaaacactcttcttgtagaaactgcaagtggatatttggtcctctctgaggatttcgttggaaacgggataaaccgcacagaactaaacagaagatttctcagagccctcttcgtgatgtttgcattcaactcacagtgctgaacctttctttgatagtgcagctttgaaacactctttttgtagaaactgcaagtggatatttggtcctctctgagcatttcgttggaaacgggataaaccgcacagaactaaaacagaagcattcacagaaaactcttggtgacgactgagtttaactcacagagctgaacattcctttggatggagcagtttcgaaacacactatttgtagaatctgcaagtggatatttgggcctctctgaggatttcgttggaaacgggataaaacgcacagaactaaaacagaagcattctcagaaactactttgtgatgattgcattcaagtcacagagttgaacattccctttgacagagcagtttggaaactctctttgtgtagaatctgcaagtggagatatggaccgctttgaggcctatggtagtaaaggaaatagcttcatataaaagctagacagtagcattctcagaaacttctttgtgatgcttgcattcaactcacagagttgaactttcctttcgagagagaagctttgaaacactctttttccggaatctgcaagtggacatttggagggctttgaggcctgtggtggaaaaggaattatcttcccgtaaaagctagatagaagcattgtcagaaacttctttgtgatgattgcattcaactcacagagttgaaggttccttttcaaacagcagtttccaatcactctttctgtggaatctgcaagtggatatttggacctattttgaagatttccttggaaacggtataatcttcacagaaaagctaaacagaagcattctcagaaacttctctgtgatgtttgtgttcaactcccagagtttcacgttgcttttcatagagtagttctgaaacatgcttttcgtagtgtctgcaagtggacatttggagcgctttcaggcctgtggtggaaaacgaattatggtcacataaaaactggagagaagccttctcagaaacttctctgcgatgattgcattcaactcacagagttgaaccctcgtatggatagagcagtgttgaaactatgtttttgtggaatctgcaagtggatatgtggacctcgccgaagatgtctttggaaacgggaatatcttcacataaaaactaaacagaagcattctcagaaacttcttggtgatgtttgcattcaaatcccagagttgaaccttcctttgatagttcaggtttgaaacactctttttgtaggatctgcaagtggatatttggaccactctgtggccttcgttcgaaacgggtatatcttcgcataaaatctagacagaagcattctcagaaaatactttgtgatgattgagtttaactcacagagctgaacattcctttggatggagcaggtttgagacacactttttgtagaatctacaagtggatatttggacctctctgaggatttcgttggaaacgcgataactgcacctaactaaacggaagcattctcagaaactgctttgtgatgattgcattcacctcacagagttgaacattcctattgatagagcagtttggaaacactcttgttgtggagtgtgcaagtggagatttggagcgctttgaggcctatggtagtaaagggaatagcttcatagaaaaactagacagatgcattctcaggaactttttggtgatgtttgtattcaactcccagagttgaactttcctttggaaagagcagctatgaaacactgtttttctagaatctgcaagtggacgtttggagggctttgtggtttgtggtggaaaaggaaatatcttcacctaaatactagatagaagcattctcagaagcttctctgtgatgactgcattcaactcacggagttgaacactccttttgagagcgcagttttgaaactctctttctgtggcatctgcaaggggacatgtagacctctttgaagatttcgttggaaacggaatcatcttcacataaaaactatacagaagcagtctcagaatcttctttgtgatgtttgcattcaaatccccgagttgaactttcctttcaaagttcacgtttgaaacactctttttgcaggatctacaagtggatatttggaccactctgtgtccttcgttcgaaacgggtatatcttcacatgacatctagacagaagctttctcagaaaattctttgggatgattgagttgaactcacagagctgagcattccttgcgatgtagcagtttagaaacacactttctgcagaatctgcaagtgcatatttggacctctgtgaggaattcgttggaaacgggataatttcagctgactaaacagaagcattctcagaaccttcttcgtgatgtctgcattcaactcacagtgtggaacctttctttgatagttcaggtttgaaacactctttctgtagaaactgcaaggggataattgcactctttgaggagtaccgtagtaaaggaaataacttcctataaaaagaagacagaagcattctcagaaccctcttcgtgatgtttgcattcaactcacagtgctgaacctttctttgatagttcagctttgaaacactctttttgtagaaactgcaagtggatatttggtcctctctgaggatttcgttggaaacgggataaactgcacagaactaaacagaagcattctcagaaccttcttcgtgatgtttgcattcaactcacagtgttgaacctttcttagatagttcaggtttgaaacggtctttctgtagaaactgcaagtagatatttggacctctctgaggatttcgttggaaacgggataacccgcacagaactaaaacagaagcattcacagaaaactcatggtgacgaatgagtttaactcacagagctgaacattcctttggatggagcagtttcgaaacacactatttgtagaatgtgcaagtggatatttgggcctctctgaggatttcgttggaaacgggataaaccgcacagacctaaacagaagcattctcagaaactactttgtgatgattgcattcaagtcacagagttgaacattccctttgacagagcagtttggaaactctctttgtgtagaatctgcaagtggagatatggaccgctttgaggcctatggtagtaaaggaaatagcttcatataaaagctagacagtagcattctcagaaacttctttgtgatgcttgcattcaactcacagagttgaactttcctttcgagagagaagctttgaaacactctttttccagaatgtgcaagtggacatttggggagctttgaggcctgtggtggaaaaggaattatcttcccgtaaaagctagatagaagcattgtcagaaacttctttgtgatgattgcattcaactcacagagttgaaggttccttttcaaacagcagtttccaatcactctttctgtggaatctgcaagtggatatttcgacctctttgaagatttcgttggaaacgggagaatcttcacagaaaagctaaacagaagcattctcagaaacttctctgtgatgtttgtgttcaactcccagagtttcacgttgcttttcatagagtagttctgaaacatgcttttcgtagtgtctgcaagtggacatttggagcgctttcaggcctgtggtggaaaacgaattatggtcacataaaaactggagagaagccttctcagaaacttctctgtgatgattgcattcaactcacagagttgaaccctcctatggatagagcagtgttgaaactctctttttgtggaatctgcaagtggatatgtggacctctccgaagatgtctttggaaacgggaatatcttcacataaaaactaaacagaagcattctcagaaacttcttggtgatgtttgcattcaaatcccagagttgaaccttcctttgatagttcaggtttgaaacactctttctgtaggatctgcaagtggctatttggaccactctgtggccttcgttcgaaatgggtatatcttcgcataaaatctagacagaagcattctcagaaaatactttgtgatgattgagttaaaatcacagagctgaacattcctttggatggagcaggtttgagacacactttttgtagaatctacaagtggatatttggacctctctgaggatttcgttggaaacgggataactgcacctaactaaacggaagcattctcagaaactgctttgtgatgattgcattcacctcacagagttgaacattcctattgatagagcagtttggaaacactcttgttgtggaatgtgcaagtggagatttggagcgctttgaggcctatggtagtaaagggaatagcttcatagaaaaactagacagatgcattctcaggaactttttggtgatgtttgtattcaactcccagagttgaactttcctttggaaagagcagctatgaaacactctttttctagaatctgcaagtggacgtttggagggctttgtggtttgtggtggaaaaggaaatatcttcacctaaatactagatagaagcattctcagaagcttctctgtgatgactgcattcaactcacggagttgaacactccttttgagagcgcagttttgaaactctctttctgtggcatctgcaaggggacatgtagacctctttgaagatttcgttggaaacggaatcatcttcacataaaaactatacagaagcagtctcagaatcttctttgtgatgtttgcattcaaatcccagagttgaactttcctttcaaagttcacgtttgaaacactctttttgcaggatctacaagtggatatttggaccactctgtgtccttcgttcgaaacgggtatatcttcacacgacatctagacagaagctttctcagaaaattctttgggatgattgagtggaactcacagagctgaacattccttgcgatgtagcagtttagaaacacactttctgcagaatctgcaagtgcatatttggacctctctgaggaattcgttggaaacgggataatttcagctgactaaacagaagcattctcagaaccttcttcgtgatgtctgcattcaactcacagtgtggaacctttctttgatagttcaggtttgaaacactctttttgtagaaactgcaaggggataattgcacttctttgaggcctaccgtagtaaaggaaataacttcctatagaaagaagacagaagcattctcagaaccctcttcgtgatgtttgcattcaactcacagtgctgaacctttctttgatagttcagctttgaaacactcttcttgtagaaactgcaagtggatatttggtcctctctgaggatttcgttggaaacgggataaaccgcacagaactaaacagaagaattctcagagccctcttcgtggtgtttgcattcaactcacagtgctgaacctttctttgatagtgcagctttgaaacactctttttgtagaaactgcaagtggatatttggtcctctctgaggatttcgttggaaacgggataaaccgcacagaactaaaacagaagcattcacagaaaactcttggtgacgactgagtttaactcacagagctgaacattcctttggatggagcagtttcgaaacacactatttgtagaatctgcaagtggatatttgggcctctctgaggatttcgttggaaacgggataaaccgcacagaactaaaacagaagcattctcagaaactactttgtgatgattgcattcaagtcacagagttgaacattccctttgacagagcagtttggaaactctctttgtgtagaatctgcaagtggagatatggaccgctttgaggcctatggtagtaaaggaaatagcttcatataaaagctagacagtagcattctcagaaacttcttggtgatgcttgcattcaactcacagagttgaactttcctttcgagagagaagctttgaaacactctttttccagaatctgcaagtggacatttggagggctttgaggcctgtggtggaaaaggaattatcttcccgtaaaagctagatagaagcattgtcagaaacttctttgtgatgattgcattcaactcacagagttgaaggttccttttcaaagagcagtttccaatcactctttctgtggaatctgcaagtggatatttggacctctttgaagatttcgttggaaacgggagaatcttcacagaaaagctaaagagaagcattctcagaaacttctctgtgatgtttgtgttcaactcccagagtttcacgttgcttttcatagagtagttctgaaacatgcttttcgtagtgtctgcaagtggacatttggagcgctttcaggcctgtggtggaaaacgaattatggtcacataaaaactggagagaagccttctcagaaacttctctgtgatgattgcattgaactcacagagttgaaccctcctatggatagagcagtgttgaaactctctttttgtggaatctgcaagtggatatgtggacctctccgaagatgtctttggaaacgggaatatcttcacataaaaactaaacagaagcattctcagaaacttcttggtgatgtttgcattcaaatcccagagttgaaccttcctttgatagttcaggtttgaaacactctttttgtaggatctgcaagtggctatttggaccactctgtggccttcgttcgaaacgggtatatcttcgcataaaatctagacagaagcattctcagaaaatactttgtgatgattgagtttaaatcacagagctgaacattcctttggatggagcaggtttgagacacactttttgtagaatctacaagtggatatttggacctctctgaggatttcgttggaaacgggataactgcacctaactaaacggaagcattctcagaaactgctttgtgatgattgcattcacctcacagagttgaacattcctattgatagagcagtttggaaacactcttgttgtggaatgtgcaagtggagatttggagcgctttgaggcctatggtagtaaagggaatagcttcatagaaaaactagacagatgcattctcaggaactttttggtgatgtttgtattcaactcccagagttgaactttcctttggaaagagcagctatgaaacactctttttctagaatctgcaagtggacgtttggagggctttgtggtttgtggtggaaaaggaaatatcttcacctaaatactagatagaagcattctcagaagcttctctgtgatgactgcattcaactcacggagttgaacactccttttgagagcgcagttttgaaactctctttctgtggcatctgcaaggggacatgtagacctctttgaagatttcgttggaaacggaatcatcttcacataaaaactatacagaaacagtctcagaatcttctttgtgatgtttgcattcaaatcccagagttgaactttcctttcaaagttcacgtttgaaacactctttttgcaggatctacaagtggatatttggaccactactgtgtccttcgttcgaaacgggtatatcttcacatgacatctagacagaagctttctcagaaaattctttgggatgattgagtggaactcacagagctgaacattccttgcgatgtagcagtttagaaacacactttctgcagaatctgcaagtgcatatttggacctctctgaggaattcgttggaaacgggataatttcagctgactaaacagaagcattctcagaaccttcttcgtgatgtctgcattcaactcacagtgtggaacctttctttgatagttcaggtttgaaacactctttttgtagaaactgcaaggggataattgcacttctttgaggcctaccgtagtaaaggaaataacttcctatagaaagaagacagaagcattctcagaaccctcttcgtgatgtttgcattcaactcacagtgctgaacctttctttgatagttcagctttgaaacactcttcttgtagaaactgcaagtggatatttggtcctctctgaggatttcgttggaaacgggataaaccgcacagaactaaacagaagaattctcagagccctcttcgtgatgtttgcattcaactcacagtgctgaacctttctttgatagtgcagctttgaaacactctttttgtagaaactgcaagtggatatttggtcctctctgaggatttcgttggaaacgggataaaccgcacagaactaaaacagaagcattcacagaaaactcttggtgacgactgagtttaactcacagagctgaacattcctttggatggagcagtttcgaaacacactatttgtagaatctgcaagtggatatttgggcctctctgaggatttcgttggaaacgggataaaacgcacagaactaaaacagaagcattctcagaaactactttgtgatgattgcattcaagtcacagagttgaacattccctttgacagagcagtttggaaactctctttgtgtagaatctgcaagtggagatatggaccgctttgaggcctatggtagtaaaggaaatagcttcatataaaagctagacagtagcattctcagaaacttctttgtgatgcttgcattcaactcacagagttgaactttcctttcgagagagaagctttgaaacactctttttccagaatgtgcaagtggacatttggggagctttgaggcctgtggtggaaaaggaattatcttcccgtaaaagctagatagaagcattgtcagaaacttctttgtgatgattgcattcaactcacagagttgaaggttccttttcaaacagcagtttccaatcactctttctgtggaatctgcaagtggatatttcgacctctttgaagatttcgttggaaacgggagaatcttcacagaaaagctaaacagaagcattctcagaaacttctctgtgatgtttgtgttcaactcccagagtttcacgttgcttttcatagagtagttctgaaacatgcttttcgtagtgtctgcaagtggacatttggagcgctttcaggcctgtggtggaaaacgaattatggtcacataaaaactggagagaagcattctcagaaaatactttgtgatgattgagtttaaatcacagagctgaccattcctttggatggagcaggtttgagacacactttttgtagaatctacaagtggatatttggacctctctgaggatttcgttggaaacgggataactgcacctaactaaacggaagcattctcagaaactgctttgtgatgattgcattcacctcacagagttgaacattcctattgatagagcagtttggaaacactcttgttgtggaatgtgcaagtggagatttggagcgctttgaggcctgtggtagtaaagggaatagcttcatagaaaaactagacagatgcattctcaggaactttttggtgatgtttgtattcaactcccagagttgaactttcctttggaaagagcagctatgaaacactctttttctagaatctgcaagtggacgtttggagggctttgtggtttgtggtggaaaaggaaatatcttcacctaaatactagatagaagcattctcagaagcttctctgtgatgactgcattcaactcacggagttgaacactccttttgagagcgcagttttgaaactctctttctgtggcatctgcaaggggacatgtagacctctttgaagatttcgttggaaacggaatcatcttcacataaaaactatacagaagcagtctcagaatcttctttgtgatgtttgcattcaaatcccagagttgaactttcctttcaaagttcacgtttgaaacactctttttgcaggatctacaagtggatatttggaccactctgtgtccttcgttcgaaacgggtatatcttcacacgacatctagacagaagctttctcagaaaattctttgggatgattgagtggaactcacagagctgaacattccttgcgatgtagcagtttagaaacacactttctgcagaatctgcaagtgcatatttggacctctctgaggaattcgttggaaacgggataatttcagctgactaaacagaagcattctcagaaccttcttcatgatgtctgcattcaactcacagtgtggaacctttctttgatagttcaggtttgaaacactctttttgtagaaactgcaaggggataattgcacttctttgaggcctaccgtagtaaaggaaataacttcctatagaaagaagacagaagcattctcagaaccctcttcgtgatgtttgcattcaactcacagtgctgaacctttctttgatagttcagctttgaaacactcttcttgtagaaactgcaagtggatatttggtcctctctgaggatttcgttggaaacgggataaaccgcacagaactaaacagaagaattctcagagccctcttcgtgatgtttgcattcaactcacagtgctgaacctttctttgatagtgcagctttgaaacactctttttgtagaaactgcaagtggatgtttggtcctctctgaggatttcgttggaaacgggataaaccgcacagaactaaaacagaagcattgtcagaaacttctttgtgatgattgcattcaactcacagagttgaaggttccttttcaaacagcagtttccaatcactctttctgtggaatctgcaagtggatatttgggcctctctgaggatttcgttggaaacgggataaaacgcacagaactaaaacagaagcattctcagaaacttctctgtgatgtttgtgttcaactcccagagtttcacgttgcttttcatagagtagttctgaaacatgcttttcgtagtgtctgcaagtggacatttggagcgctttcaggcctgtggtggaaaacgaattatggtcacataaaaactggagagaagccttctcagaaacttctctgtgatgattgcattcaactcacagagttgaaccctcctatggatagagcagtgttgaaactctctttttgtggaatctgcaagtggatatgtggacctctccgaagatgtctttggaaacgggaatatcttcacataaaaactaaacagaagcattctcagaaacttcttggtgatgtttgcattcaaatcccagagttgaaccttcctttgatagttcaggtttgaaacactctttttgtaggatctgcaagtggctatttggaccactctgtggccttcgttcgaaacgggtatatcttcgcataaaatctagacagaagcattctcagaaaatactttgtgatgattgagtttaaatcacagagctgaccattcctttggatggagcaggtttgagacacactttttgtagaatctacaagtggatatttggacctctctgaggatttcgttggaaacgggataactgcacctaactaaacggaagcattgtcagaaactgctttgtgatgattgcattcacctcacagagttgaacattcctattgatagagcagtttggaaacactcttgttgtggaatgtggaagtggagatttggagcgctttgaggcctatggtagtaaagggaatagcttcatagaaaaattagacagatgcattctcaggaactttttggtgatgtttgtattcaactcccagagttgaactttccctttggaaagagcagctatgaaacactctttttctagaatctgcaagtggacgtttggagggctttgtggtttgtggtggaaaaggaaatatcttcacctaaatactagatagaagcattctcagaagcttctctgtgatgactgcattcaactcacggagttgaacactccttttgagagcgcagttttgaaactctctttctgtggcatctgcaaggggacatgtagacctctttgaagatttcgttggaaacggaatcatcttcacataaaaactatacagaagcagtctcagaatcttctttgtgatatttgcattcaaatcccagagttgaactttcctttcaaagttcacgtttgaaacactctttttgcaggatctacaagtggatatttggaccactctgtgtccttcgttcgaaacgggtatatcttcacatgacatctagacagagaaagctttctcagaaaattctttgggatgattgagtagaactcacagagctgagcattccttgcgatgtagcagtttagaaacacactttctgcagaatctgcaagtgcatatttggacctctgtgaggaattcgttggaaacgggataatttcagctgactaaacagaagcattctcagaaccttcttcgtgatgtctgcattcaactcacagtgtggaacctttctttgataggtcaggtttgaaacactctttttgtagaaactgcaaggggataattgcactctttgaggagtaccgtagtaaaggaaataacttcctataaaaagaagacagaagaattctcagagccctcttcgtgatgtttgcattcaactcacaagtgctgaacctttctttgatagtgcagctttgaaacactctttttgtagaaactgcaagtggatgtttggtcctctctgaggatttcgttggaaacgggataaaccgcacagaactaaaacagaagcattgtcagaaacttctttgtgatgattgcattcaactcacagagttgaaggttccttttcaaacagcagtttccaatcactctttctgtggaatctgcaagtggatatttgggcctctctgaggatttcgttggaaacgggataaaacgcacagaactaaaacagaagcattctcagaaacttctctgtgatgtttgtgttcaactcccagagtttcacgttgcttttcatagagtagttctgaaacatgcttttcgtagtgtctgcaagtggacatttggagcgctttcaggcctgtggtggaaaatgaattatggtcacaaaaaaactggagagaagccttctcagaaacttctctgtgatgattgcattcaactcacagagttgaaccctcctatggatagagcagtgttgaaactctctttttgtggaatctgcaagtggatatgtggacctctccgaagatgtctttggaaacgggaatatcttcacataaaaactaaacagaagcattctcagaaacttcttggtgatgtttgcattcaaatcccagagttgaaccttcctttgatagttcaggtttgaaacactctttctgtaggatctgcaagtggctatttggaccactctgtggccttcgttcgaaacgggtatatcttcgcataaaatctagacagaagcattctcagaaaatactttgtgatgattgagtttaaatcacagagctgaccattcctttggatggagcaggtttgagacacactttttgtagaatctacaagtggatatttggacctctctgaggatttcgttggaaacgggataactgcacctaactaaacggaagcattctcagaaactgctttgtgatgattgcattcacctcacagagttgaacattcctattgatagagcagtttggaaacactcttgttgtggaatgtgcaagtggagatttggagcgctttgaggcctatggtagtaaagggaatagcttcatagaaaaactagacagatgcattctcaggaactttttggtgatgtttgtattcaactcccagagttgaactttcctttggaaagagcagctatgaaacactctttttctagaatctgcaagtggacgtttggagggctttgtggtttgtggtggaaaaggaaatatcttcacctaaatactagatagaagcattctcagaagcttctctgtgatgactgcattcaactcacggagttgaacactccttttgagagcgcagttttgaaactctctttctgtggcatctgcaaggggacatgtagacctctttgaagatttcgttggaaacggaatcatcttcacataaaaactatacagaagcagtctcagaatcttctttgtgatgtttgcattcaaatcccagagttgaactttcctttcaaagttcacgtttgaaacactctttttgcaggatctacaagtggatatttggaccactctgtgtccttcgttcgaaacgggtatatcttcacacgacatctagacagaagctttctcagaaaattctttgggatgattgagtggaactcacagagctgaacattccttgtgatgtagcagtttagaaacacactttctgcagaatctgcaagtgcatatttggacctctctgaggaattcgttggaaacgggataatttcagctgactaaacagaagcattctcagaaccttcttcgtgatgtctgcattcaactcacagtgtggaacctttctttgatagttcaggtttgaaacactctttttgtagaaactgcaaggggataattgcacttctttgaggcctaccgtagtaaaggaaataacttcctatagaaagaagacagaagcattctcagaaccctcttcgtgatgtttgcattcaactcacagtgctgaacctttctttgatagttcagctttgaaacactcttcttgtagaaactgcaagtggatatttggtcctctctgaggatttcgttggaaacgggataaaccgcacagaactaaacagaagcattctctgaaccctcttcgtgatgtttgcattcaactcacagtgttgaacctttctttgatagttcaggttggaaacggtctttctgtagaaactgcaagtagatatttggacctctctgaggatttcgttggaaacgggataaaccgcacagaactaaaacagaagcattcacagaaaactcttggtgacgactgagtttaactcacagagctgaacattcctttggatggagcagtttcgaaacacactatttgtagaatgtgcaagtggatatttgggcctctctgaggatttcgctggaaacgggataaaccgcacagaactaaacagaagcattctcagaaactactttgtgatgattgcattcaagtcacagagttgaacattccctttgacagagcagtttggaaactctctttgtgtagaatctgcaagtggagatatggaccgctttgaggcctatggtagtaaaggaaatagcttcatataaaagctagacagtagcattctcagaaacttctttgtgatgcttgcattcaactcacagagttgaactttcctttcgagagagaagctttgaaacactctttttccagaatgtgcaagtggacatttggggagctttgaggcctgtggtggaaaaggaattatcttcccgtaaaagctagatagaagcattgtcagaaacttctttgtgatgattgcattcaactcacagagttgaaggttccttttcaaacagcagtttccaatcactctttctgtggaatctgcaagtggatatttcgacctctttgaagatttcgttggaaacgggagaatcttcacagaaaagctaaacagaagcattctcagaaacttctctgtgatgtttgtgttcaactcccagagtttcacgttgcttttcatagagtagttctgaaacatgcttttcgtagtgtctgcaagtggacatttggagcgctttcaggcctgtggtggaaaacgaattatggtcacataaaaactggagagaagccttctcagaaacttctctgtggtgattgcattcaactcacagagttgaaccctcctatggatagagcagtgttgaaactctctttttgtggaatctgcaagtggatatgtggacctctccgaagatgtctttggaaacgggaatatcttcacataaaaactaaacagaagcattctcagaaacttcttggtgatgtttgcattcaaatcccagagttgaaccttcctttgatagttcaggtttgaaacactctttttgtaggatctgcaagtggctatttggaccactctgtggccttcgttcgaaacgggtatatcttcgcataaaatctagacagaaacattctcagaaaatactttgtgatgattgagtttaaatcacagagctgaacattcctttggatggagcaggtttgagacacactttttgtagaatctacaagtggatatttggacctctctgaggatttcgttggaaacgggataactgcacctaactaaacggaagcattctcagaaactgctttgtgatgattgaattcacctcacagagttgaacattcctattgatagagcagtttggaaacactcttgttgtggaatgtgcaagtggagatttggagcgctttgaggcctatggtagtaaagggaatagcttcatagaaaaactagacagatgcattctcaggaactttttggtgatgtttgtattcaactcccagagttgaactttcctttggaaagagcagctatgaaacactctttttctagaatctgcaagtggacgtttggagggctttgtggtttgtggtggaaaaggaaatatcttcacctaaatactagatagaagcattctcagaagcttctctgagatgactgcattcaactcacggagttgaacactccttttgagagcgcagttttgaaactctctttctgtggcatctgcaaggggacatgtagacctctttgaagatttcgttggaaacggaatcatcttcacataaaaactatacagaagcagtctcagaatcttctttgtgatgtttgcattcaaatcccagagttgaactttcctttcaaagttcacgtttgaaacactctttttgcaggatctacaagtggatatttggaccactctgtgtccttcgttcgaaacgggtatatcttcacacgacatctagacagaagctttctcagaaaattctttgggatgattgagtggaactcaacagagctgaacattccttgcgatgtagcagtttagaaacacactttctgcagaatctgcaagtgcatatttggacctctctgaggaattcgttggaaacgggataatttcagctgactaaacagaagcattctcagaaccttcttcgtgatgtctgcattcaactcacagtgtggaacctttctttgatagttcaggtttgaaacactctttttgtagaaactgcaaggggataattgcacttctttgaggcctaccgtagtaaaggaaataacttcctatagaaagaagacagaagcattctcagaaccctcttcgtgatgtttgcattcaactcacagtgctgaacctttctttgatagttcagctttgaaacactcttcttgtagaaactgcaagtggatatttggtcctctctgaggatttcgttggaaacgggataaaccgcacagaactaaacagaagaattctcagagccctcttcgtgatgtttgcattcaactcacagtgctgaacctttctttgatagtgcagctttgaaacactctttttgtagaaactgcaagtggatgtttggtcctctctgaggatttcgttggaaacgggataaaccgcacagaactaaaacagaagcattgtcagaaacttctttgtgatgattgcattcaactcacagagttgaaggttccttttcaaacagcagtttccaatcactctttctgtggaatctgcaagtggatatttgggcctctctgaggatttcgttggaaacgggataaaacgcacagaactaaaacagaagcattctcagaaacttctctgtgatgtttgtgttcaactcccagagtttcacgttgcttttcatagagtagttctgaaacatgcttttcgtagtgtctgcaagtggacatttggagcgctttcaggcctgtggtggaaaacgaattatggtcacataaaaactggagagaagccttctcagaaacttctctgtgatgattgcattcaactcacagagttgaaccctcctatggatagagcagtgttgaaactctctttttgtggaatctgcaagtggatatgtggacctctccgaagatgtctttggaaacgggaatatcttcacataaaaactaaacagaagcattctcagaaacttcttggtgatgtttgcattcaaatcccagagttgaaccttcctttgatagttcaggtttgaaacactctttttgtaggatctgcaagtggatatttggaccactctgtggccttcgttcgaaacgggtatatcttcgcataaaatctagacagaagcattctcagaaaatactttgtgatgattgagtttaactcacagagctgaacattcctttggatggagcaggtttgagacacactttttgtagaatctacaagtggatatttggacctctctgaggatttcgttggaaacgggataactgcacctaactaaacggaagcattctcagcaaactgctttgtgatgattgcattcacctcacagagttgaacattcctattgatagagcagtttggaaacactcttgttgtggaatgtgcaagtggagatttggagcgctttgaggcctatggtagtaaagggaatagcttcatagaaaaactagacagatgcattctcaggaactttttggtgatgtttgtattcaactcccagagttgaactttcctttggaaagagcagctatgaaacactgtttttctagaatctgcaagtggacgtttggagggctttgtggtttgtggtggaaaaggaaatatcttcacctaaatactagatagaagcatcctcagaagcttctctgtgatgactgcattcaactcacggagttgaacactccttttgagagcgcagttttgaaactctctttctgtggcatctgcaaggggacatgtagacctctttgaagatttcgttggaaacggaatcatcttcacataaaaactatacagaagcagtctcagaatcttctttgtgatgtttgcattcaaatccccgagttgaactttcctttcaaagttcacgtttgaaacactctttttgcaggatctacaagtggatatttggaccactctgtgtccttcgttcgaaacgggtatatcttcacatgacatctagacagaagctttctcagaaaattctttgggatgattgagttgaactcacagagctgagcattccttgcgatgtagcagtttagaaacacactttctgcagaatctgcaagtgcatatttggacctctgtgaggaattcgttggaaacgggataatttcagctgactaaacagaagcattctcagaaccttcttcgtgatgtctgcattcaactcacagtgtggaacctttctttgatagttcaggtttgaaacactctttctgtagaaactgcaaggggataattgcactctttgaggagtaccgtagtaaaggaaataacttcctataaaaagaagacagaagcattctcagaaccctcttcgtgatgtttgcattcaactcacagtgctgaacctttctttgatagttcagctttgaaacactctttttgtagaaactgcaagtggatatttggtcctctctgaggatttcgttggaaacgggataaactgcacagaactaaacagaagcattctcagaaccttcttcgtgatgtttgcattcaactcacagtgttgaacctttctttgatagttcaggtttgaaacggtctttctgtagaaactgcaagtagatatttggacctctctgaggatttcgttggaaacgggataacccgcacagaactaaaacagaagcattcacagaaaactcttggtgacgactgagtttaactcacagagctgaacattcctttggatggagcagtttcgaaacacactatttgtagaatgtgcaagtggatatttaggcctctctgaggatttcgttggaaacgggataaaccgcacagaactaaacagaagcattctcagaaactactttgtgatgattgcattcaagtcacagagttgaacattccctttgacagagcagtttggaaactctctttgtgtagaatctgcaagtggagatatggaccgctttgaggcctatggtagtaaaggaaatagcttcatataaaagctagacagtagcattctcagaaacttctttgtgatgcttgcattcaactcacagagttgaactttcctttcgagagagaagctttgaaacactctttttccagaatctgcaagtggacatttggagggctttgaggcctgtggtggaaaaggaattatcttccggcaaaagctagatagaagcattgtcagaaacttctttgtgatgattgcattcaactcacagagttgaaggttccttttcaaacagcagtttccaatcactctttctgtggaatccgcaagtggatatttggacctctttgaagatttcgttggaaacgggagaatcttcacagaaaagctaaacagaagcattctcagaaacttctctgtgatgtttgtgttcaactcccagagtttcacgttgcttttcatagagtagttctgaaacatgcttttcgtagtgtctgcaagtggacatttggagcgctttcaggcctgtggtggaaaacgaattatggtcacataaaaactggagagaagccttctcagaaacttctctgtgatgattgcattcaactcacagagttgaaccctcctatggatagagcagtgttgaaactctctttttgtggaatctgcaagtggatatgtggacctctccgaagatgtctttggaaacgggaatatcttcacataaaaactaaaaagaagcattctcagaaacttcttggtgatgtttgcattcaaatcccagagttgaaccttcctttgatagttcaggtttgaaacactctttctgtaggatctgcaagtggctatttggaccactctgtggccttcgttcgaaacgggtatatcttcgcataaaatctagacagaagcattctcagaaaatactttgtgatgattgagtttaaatcacagagctgaccattcctttggatggagcaggtttgagacacactttttgtagaatctacaagtggatatttggacctctctgaggatttcgttggaaacgggataactgcacctaactaaacggaagcattctcagaaactgctttgtgatgattgcattcacctcacagagttgaacattcctattgatagagcagtttggaaacactcttgttgtggaatgtgcaagtggagatttggagcgctttgaggcctgtggtagtaaagggaatagcttcatagaaaaactagacagatgcattctcaggaaccttttggtgatgtttgtattcaactcccagagttgaactttcctttggaaagagcagctatgaaacactctttttctagaatctgcaagtggacgtttggagggctttgtggtttgtggtggaaaaggaaatatcttcacctaaatactagatagaagcattctcagaagcttctctgtgatgactgcattcaactcacggagttgaacactccttttgagagcgcagttttgaaactctctttctgtggcatctgcaaggggacatgtagacctctttgaagatttcgttggaaacggaatcatcttcacataaaaactatacagaagcagtctcagaatcttctttgtgatgtttgcattcaaatcccagagttgaactttcctttcaaagttcacgtttgaaacactctttttgcaggatctacaagtggatatttggaccactctgtgtccttcgttcgaaacgggtatatcttcacacgacatctagacagaagctttctcagaaaattctttgggatgattgagtggaactcacagagctgaacattccttgcgatgtagcagtttagaaacacactttctgcagaatctgcaagtgcatatttggacctctctgaggaattcgttggaaacgggataatttcagctgactaaacagaagcattctcagaaccttcttcgtgatgtctgcattcaactcacagtgtggaacctttctttgatagttcaggtttgaaacactctttttgtagaaactgcaaggggataattgcacttctttgaggcctaccgtagtaaaggaaataacttcctatagaaagaagacagaagcattctcagaaccctcttcgtgatgtttgcattcaactcacagtgctgaacctttctttgatagttcagctttgaaacactcttcttgtagaaactgcaagtggatatttggtcctctctgaggatttcgttggaaacgggataaaccgcacagaactaaacagaagaattctcagagccctcttcgtgatgtttgcattcaactcacagtgctgaacctttctttgatagtgcagctttgaaacactctttttgtagaaactgcaagtggatatttggtcctctctgaggatttcgttggaaacgggataaaccgcacagaactaaaacagaagcattgtcagaaacttctttgtgatgattgcattcaactcacagagttgaaggttccttttcaaacagcagtttccaatcactctttctgtggaatctgcaagtggatatttgggcctctctgaggatttcgttggaaatgggataaaacgcacagaactaaaacagaagcattctcagaaacttctctgtgatgtttgtgttcaactcccagagtttcacgttgcttttcatagagtagttctgaaacatgcttttcgtagtgtctgcaagtggacatttggagcgctttcaggcctgtggtggaaaacgaattatggtcacataaaaactggagagaagccttctcagaaacttctctgtgatgattgcattcaactcacagagttgaaccctcctatggatagagcagtgttgaaactctctttttgtggaatctgcaagtggatatgtggacctctccgaagatgtctttggaaacgggaatatcttcacataaaaactaaacagaagcattctcagaaacttcttggtgatgtttgcattcaaatcccagagttgaaccttcctttgatagttcaggtttgaaacactctttctgtaggatctgcaagtggctatttggaccactctgtggccttcgttcgaaacgggtatatcttcgcataaaatctagacagaagcattctcagaaaatactttgtgatgattgagtttaaatcacagagctgaccattcctttggatggagcaggtttgagacacactttttgtagaatctacaagtggatatttggacctctctgaggatttcgttggaaacgggataactgcacctaactaaacggaagcattctcagaaactgctttgtgatgattgcattcacctcacagagttgaacattcctattgatagagcagtttggaaacactcttgttgtggaatgtgcaagtggagatttggagcgctttgaggcctgtggtagtaaagggaatagcttcatagaaaaactagacagatgcattctcaggaactttttggtgatgtttgtattcaactcccagagttgaactttcctttggaaagagcagctatgaaacactctttttctagaatctgcaagtggacgtttggagggctttgtggtttgtggtggaaaaggaaatatcttcacctaaatactagatagaagcattctcagaagcttctctgtgatgactgcattcaactcacggagttgaacactccttttgagagcgcagttttgaaactctctttctgtggcatctgcaaggggacatgtagacctctttgaagatttcgttggaaacggaatcatcttcacataaaaactatacagaagcagtctcagaatcttctttgtgatgtttgcattcaaatcccagagttgaactttcctttcaaagttcacgtttgaaacactctttttgcaggatctacaagtggatatttggaccactctgtgtccttcgttcgaaacgggtatatcttcacacgacatctagacagaagctttctcagaaaattctttgggatgattgagtggaactcacagagctgaacattccttgcgatgtagcagtttagaaacacactttctgcagaatctgcaagtgcatatttggacctctctgaggaatttgttggaaacgggataatttcagctgactaaacagaagcattctcagaaccttcttcgtgatgtctgcattcaactcacagtgtggaacctttctttgatagttcaggtttgaaacactctttttgtagaaactgcaaggggataattgcacttctttgaggcctaccgtagtaaaggaaataacttcctatagaaagaagacagaagcattctcagaaccctcttcgtgatgtttgcattcaactcacagtgctgaacctttctttgatagttcagctttgaaacactcttcttgtagaaactgcaagtggatatttggtcctctctgaggatttcgttggaaacgggataaaccgcacagaactaaacagaagaattctcagagccctcttcgtgatgtttgcattcaactcacagtgctgaacctttctttgatagtgcagctttgaaacactctttttgtagaaactgcaagtggatatttggtcctctctgaggatttcgttggaaacgggataaaccgcacagaactaaaacagaagcattgtcagaaacttctttgtgatgattgcattcaactcacagagttgaaggttccttttcaaacagcagtttccaatcactctttctgtggaatctgcaagtggatatttgggcctctctgaggatttcgttggaaacgggataaaacgcacagaactaaaacagaagcattctcagaaaacttctctgtgatgtttgtgttcaactcccagagtttcacgttgcttttcatagagtagttctgaaacatgcttttcgtagtgtctgcaagtggacatttggagcgctttcaggcctgtggtggaaaacgaattatggtcacataaaaactggagagaagccttctcagaaacttctctgtgatgattgcattcaactcacagagttgaaccctcctatggatagagcagtgttgaaactctctttttgtggaatctgcaagtggatatgtggacctctccgaagatgtctttggaaacgggaatatcttcacataaaaactaaacagaagcattctcagaaacttcttggtgatgtttgcattcaaatcccagagttgaaccttcctttgatagttcaggtttgaaacactctttttgtaggatctgcaagtggctatttggaccactctgtggccttcgttcgaaacgggtatatcttcgcataaaatctagacagaaagcattctcagaaaatactttgtgatgattgagtttaaatcacagagctgaacattcctttggatggagcaggtttgagacacactttttgtagaatctacaagtggatatttggacctctctgaggatttcgttggaaacgggataactgcacctaactaaacggaagcattctcagaaactgctttgtgatgattgcattcacctcacagagttgaacattcctattgatagagcagtttggaaacactcttgttgtggaatgtgcaagtggagatttggagcgctttgaggcctatggtagtaaagggaatagcttcatagaaaaactagacagatgcattctcaggaactttttggtgatgtttgtattcaactcccagagttgaactttcctttggaaagagcagctatgaaacactgtttttctagaatctgcaagtggacgtttggagggctttgtggtttgtggtggaaaaggaaatatcttcacctaaatactagatagaagcatcctcagaagcttctctgtgatgactgcattcaactcacggagttgaacactccttttgagagcgcagttttgaaactctctttctgtggcatctgcaaggggacatgtagacctctttgaagatttcgttggaaacggaatcatcttcacataaaaactacacagaagcagtctcagaatcttctttgtgatgtttgcattcaaatccccgagttgaactttcctttcaaagttcacgtttgaaacactctttttgcaggatctacaagtggatatttggaccactctgtgtccttcgttcgaaacgggtatatcttcacatgacatctagacagaagctttctcagaaaattctttgggatgattgagttgaactcacagagctgagcattccttgcgatgtagcagtttagaaacacactttctgcagaatctgcaagtgcatatttggacctctgtgaggaattcgttggaaacgggataatttcagctgactaaacagaagcattctcagaaccttcttcgtgatgtctgcattcaactcacagtgtggaacctttctttgacaggtcaggtttgaaacactctttttgtagaaactgcaaggggataattgcactctttgaggagtaccgtagtaaaggaaataacttcctataaaaagaagacagaagcattctcagaaccctcttcgtgatgtttgcattcaactcacagtgctgaacctttctttgatagttcagctttgaaacactctttttgtagaaactgcaagtggatatttggtcctctctgaggatttcgttggaaacgggataaactgcacagaactaaacagaagcattctcagaaccttcttcgtgatgtttgcattcaactcacagtgttgaacctttctttgatagttcaggtttgaaacggtctttctgtagaaactgcaagtagatatttggacctctctgaggatttcgttggaaacgggataacccgcacagaactaaaacagaagcattcacagaaaactcttggtgacgactgagtttaactcacagagctgaacattcctttggatggagcagtttcgaaacacactatttgtagaatgtgcaagtggatatttgggcctctctgaggatttcgttggaaacgggataaaccgcacagaactaaacagaagcattctcagaaactactttgtgatgattgcattcaagtcacagagttgaacattccctttgacagagcagtttggaaactctctttgtgtagaatctgcaagtggagatatggaccgctttgaggcctatggtagtaaaggaaatagcttcatataaaagctagacagtagcattctcagaaacttctttgtgatgcttgcattcaactcacagagttgaactttcctttcgagagagaagctttgaaacactctttttccagaatctgcaagtggacatttggagggctttgaggcctgtggtggaaaaggaattatcttcccgtaaaagctagatagaagcattgtcagaaacttctttgtgatgattgcattcaactcacagagttgaaggttccttttcaaagagcagtttccaatcactctttctgtggaatctgcaagtggatatttggacctctttgaagatttcgttggaaacgggagaatcttcacagaaaagctaaacagaagcattctcagaaacttctctgtgatgtttgtgttcaactcccagagtttcacattgcttttcatagagtagttctgaaacatgcttttcgtagtgtctgcaagtggacatttggagcgctttcaggcctgtggtggaaaacgaattatggtcacataaaaactggagagaagccttctcagaaacttctctgtgatgattgcattcaactcacagagttgaaccctcctatggatagagcagtgttgaaactctctttttgtggaatctgcaagtggatatgtggacctctccgaagatgtctttggaaacgggaatatcttcacataaaaactaaacagaagcattctcagaaacttcttggtgatgtttgcattcaaatcccagagttgaaccttcctttgatagttcaggtttgaaacactctttctgtaggatctgcaagtggctatttggaccactctgtggccttcgttcgaaacgggtatatcttcgcataaaatctagacagaagcattctcagaaaatactttgtgatgattgagtttaaatcacagagctgaccattcctttggatggagcaggtttgagacacactttttgtagaatctacaagtggatatttggacctctctgaggatttcgttggaaacgggataactgcacctaactaaacggaagcattctcagaaactgctttgtgatgattgcattcacctcacagagttgaacattcctattgatagagcagtttggaaacactcttgttgtggaatgtgcaagtggagatttggagcgctttgaggcctgtggtagtaaagggaatagcttcatagaaaaactagacagatgcattctcaggaactttttggtcatgtttgtattcaacccccagagttgaactttcctttggaaagagcagctatgaaacactctttttctagaatctgcaagtggacgtttggagggctttgtggtttgtggtggaaaaggaaatatcttcacctaaatactagatagaagcattctcagaagcttctctgtgatgactgcattcaactcacggagttgaacactccttttgagagcgcagttttgaaactctctttctgtggcatctgcaaggggacatgtagacctctttgaagatttggttggaaaaggaatcatcttcacataaaaactatacagaagcagtctcagaatcttctttgtgatggtttgcattcaaatcccagagttgaactttcctttcaaagttcacgtttgaaacactctttttgcaggatctacaagtggatatttggaccactctgtgtccttcgttcgaaacgggtatatcttcacacgacatctagacagaagctttctcagaaaattctttgggatgattgagtggaactcacagagctgaacattccttgcgatgtagcagtttagaaacacactttctgcagaatctgcaagtgcatatttggacctctctgaggaattcgttggaaacgggataatttcagctgactaaacagaagcattctcagaaccttcttcgtgatgtctgcattcaactcacagtgtggaaccttactttgatagttcaggtttgaaacactctttttgtagaaactgcaaggggataattgcacttctttgaggcctaccgtagtaaaggaaataacttcctatagaaagaagacagaaagcattctcagtaaccctcttcgtgatgtttgcattcaactcacagtgctgaacctttctttgatagttcagctttgaaacactcttcttgtagaaactgcaagtggatatttggtcctctctgaggatttcgttggaaacgggttaaaccgcacagaactaaacagaagcattctcagaaccttcttcgtgatgtttgcattcaactcacagtgttgaagctttctttgatagttgaggttggaaacggtctttctgtagaaactgcaagtagatatttggacctctctgaggatttcgttggaaacgggataaactgcacagaactaaaacagaagcattcacagaaaactcttggtgacgactgagtttaactcacagagctgaacattcctttggatggagcagttttgaaacacactatttgtagaatgtgcaagtggatatttgggcctctctgaggatttcgttggaaacgggataaaccgcacagaactaaacagaagcattctcagaaactactttgtgacgattgcattcaagtcacagagttgaacattccctttcacagagcagtttggaaactctctttgtgtagaatctgcaagtggagatatggaccgctttgagacctatggtagtaaaggtaatagcttcatatgaaagctagacagtagcattctcagaaacttctttgtgatgcttgcattcaactcacagagttgaactttcctttcgagagagaagctttgaaacactctttttccagaatctgcaagtggacatttggagggctttgaggcctgtggtggaaaaggaattaacttcccgtaaaagctagatagaagcattgtcagaaacttctttgtgatgattgcattcaactcacagagatgaaggttcctttacaaacagcagtttccaaacactctttctgtggaatctgcaagtggatatttggacctctttgaagatttcgttggaaacgggagaatcttcacagaaaagctaaacagaagcattctcagaaacttctctgtgatgtttgtgttcaactcccagagtttcacattgcttttcatagagaagttctgaaacatgcttttcgtagtgtctacaagtggacatttggagcgctttcaggcctgtggtggaaaacgaattatggtcccataaaaactggagagaagccttctcagaaacttctttgtgatgattgcattcaactcacagatttcaaccctcctatggatagagcattgttgaaactctctttttgtggaatctgcaagtggatatgtggacctctccgaagatgtctttggaaacgggaatatcttcacataaaaactaaacagaagcattctcagaaacttcttggtgatgtttgcattcaaatcccagagttgaaccttcctgtgatagttcaggtttgaaacactctttttgtaggatcttcaagtggatatttgaaccactctgtggccttcgtttgaaacgggtacatcttcacataaaatctagccagaagcattctcagaaaatactttgtgatgattgagtttaactcacagagctgaacattcctttggatggagcaggtttgagacacactttttgtagaatctacaagtggatatttggacctctctgaggatttcgttggaaacgcgataactgcacctaactaaacggaagcattctcagaaactgctttgtgatgattgcattcacctcacagagttgaacattcctattgatagagcagtttggaaacactcttgttgtggaatgtgcaagtggagatttggagcgctttgaggcctatggtagtaaagggaatagcttcatagaaaaactagacagatgcattctcaggaactttttggtgatgtttgtattcaactcccagagttgaactttcctttggaaagagcagctatgaaacactctttttctagaatctgcaagtggacgtttggagggctttgtggtttgtggtggaaaaggaaatatcttcacctaaatactagatagaagcattctcagaagcttctctgtgatgactgcattcaactcacggagttgaacactccttttgagagcgcagttttgaaactctctttctgtggcatccgcaaggggacatgtggacctctttgaagatttcgttggaaacggaatcatcttcacataaaaactatacagaagcagtctcagaatcttctttgtgatgtttgcattcaaatcccagagttgaactttcctttcaaagttcacgtttgaaacactctttttgaaggatctacaagtggatatttggaccactctgtgtcctccgttcgaaacgggtatatcttcacatgacatatagacagaagctttctcagaaaattctttgggatgattgagttgaactcacagagctgaacatttccttgtgatgtagcagtttagaaacacactttctgcagaatctgcaagtgcatatttggacctctctgaggaattcgttggaaacgggataatttcagctgactaaacagaagcattctcagaaccttcttcgtgatgtctgcattcaactcacagtgtggaacctttctttgatagttcaggtttgaaacactctttttgtagaaactgcaaggggataattgcacttctttgaggcctaccgtagtaaaggaaataacttcctatagaaagaagacagaagcattctcagaaccctcttcgtgatgtttgcattcaactcacagcgctgaacctttctttgatagttcagctttgaaacactctttttgtagaaactgcaagtggatatttggtcctctctgaggatttcgttggaaacgggataaactgcacagaactaaacagaagcattctcagaaccttcttcgtgatgtttgcattcaactcacagtgttgaacctttctttgatagttcaggtttgaaacggtctttctgtagaaactgcaagtagatatttggacctctctgaggatttcgttggaaacgggataacccgcacagaactaaaacagaagcattcacagaaaactcttggtgacgactgagtttaactcacagagctgaacattcctttggatggatcagtttcgaaacacactatttgtagaatgtgcaagtggatatttgggcctctctgaggatttcgttggaaacgggataaaccgcacagaactaaacagaagcattctcagaaactactttgtgatgattgcattcaagtcacagagttgaacattccctttgacagagcagtttggaaactctctttgtgtagaatctgcaagtggagatatggaccgctttgaggcctatggtagtaaaggaaatagcttcatataaaagctagacagtagcattctcagaaacttctttgtgatgcttgcattcaactcacagagttgaactttcctttcgagagagaagctttgaaacactctttttccagaatgtgcaagtggacatttggggagctttgaggcctgtggaggaaaaggaattatcttcccgtaaaagctagatagaagcattgtcagaaacttctttgtgatgattgcattcaactcacagagttgaaggttccttttcaaacagcagtttccaatcactctttctgtggaatctgcaagtggatatttgggcctctctgaggatttcgttggaaacgggataaaacgcacagaactaaaacagaagcattctcagaaacttctctgtgatgtttgtgttcaactcccagagtttcacgttgcttttcatagagtagttctgaaacatgcttttcgtagtgtctgcaagtggacatttggagcgctttcaggcctgtggtggaaaacgaattatggtcacataaaaactggagagaagccttctcagaaacttctctgtgatgattgcattcaactcacagagttgaaccctcctatggatagagcagtgttgaaactctctttttgtggaatctgcaagtggatatgtggacctctccgaagatgtctttggaaacgggaatatcttcacataaaaactaaacagaagcattctcagaaacttcttggtgatgtttgcattcaaatcccagagttgaaccttcctttgatagttcaggtttgaaacactctttttgtaggatctgcaagtggctatttggaccactctgtggccttcgttcgaaacgggtatatcttcgcataaaatctagacagaagcattctcagaaaatactttgtgatgattgagtttaaatcacagagctgaacattcctttggatggagcaggtttgagacacactttttgtagaatctacaagtggatatttggacctctctgaggatttcgttggaaacgggataactgcacctaactaaacggaagcattctcagaaactgctttgtgatgattgcattcacctcacagagttgaacattcctattgatagagcagtttggaaacactcttgttgtggaatgtgcaagtggagatttggagcgctttgaggcctatggtagtaaagggaatagcttcatagaaaaactagacagatgcattctcaggtaactttttggtgatgtttgtattcaactcccagagttgaactttcctttggaaagagcagctatgaaacactctttttctagaatctgcaagtggacgtttggagggctttgtggtttgtggtggaaaaggaaatatcttcacctaaatactagatagaagcattctcagaagcttctctgtgatgactgcattcaactcacggagttgaacactccttttgagagcgcagttttgaaactctctttctgtggcatctgcaaggggacatgtagacctctttgaagatttcgttggaaacggaatcatcttcacataaaaactatacagaagcagtctcagaatcttctttgtgatgtttgcattcaaatcccagagttgaactttcctttcaaagttcacgtttgaaacactctttttgcaggatctacaagtggatatttggaccactctgtgtccttcgttcgaaacgggtatatcttcacatgacatctagacagaagctttctcagaaaattctttgggatgattgagttgagcaaacagagctgaacactccttgcgatgtagcagtttagaaacacactttctgcagaatctgcaagtgcatatgtggacctctctgaggaattcgttggaaacgggataatttcagctgactaaacagaagcattctcagaaccttcttcgtgatgtctgcattcaactcacagtgtggaacctttctttgatagttcaggtttgaaacactctttttgtagaaactgcaaggggatcattgcacttctttgaggcctaccgtagtaaaggagataacttactataaaaagaagacagaagcattctcagaaccctcttcgtgatgtttgcattcaactcacagtgctgaacctttctttgatagttcagctttgaaacactcttcttgtagaaactgcaagtggatatttggtcctctctgaggatttcgttggaaacgggataaaccgcacagaactaaacagaagaattctcagagccctcttcgtgatgtttgcattcaactcacagtgctgaacctttctttgatagtgcagctttgaaacactctttttgtagaaactgcaagtggatgtttggtcctctctgaggatttcgttggaaacgggataaaccgcacagaactaaaacagaagcattgtcagaaacttctttgtgatgattgcattcaactcacagagttgaaggttccttttcaaacagcagtttccaatcactctttctgtggaatctgcaagtggatatttgggcctctctgaggatttcgttggaaacgggataaaacgcacagaactaaaacagaagcattctcagaaacttctctgtgatgtttgtgttcaactcccagagtttcacgttgcttttcatagagtagttctgaaacatgcttttcgtagtgtctgcaagtggacatttggagcgctttcaggcctgtggtggaaaacgaattatggtcacataaaaactggagagaagccttctcagaaacttctctgtgatgattgcattcaactcacagagttgaaccctcctatggatagagcagtgttgaaactctctttttgtggaatctgcaagtggatatgtggacctctccgaagatgtctttggaaacgggaatatcttcacataaaaactaaacagaagcattctcagaaacttcttggtgatgtttgcattcaaatcccagagttgaaccttcctttgatagttcaggtttgaaacactctttctgtaggatctgcaagtggctatttggaccactctgtggccttcgttcgaaacgggtatatcttcgcataaaatctagacagaagcattctcagaaaatactttgtgatgattgagtttaaatcacagagctgaccattcctttggatggagcaggtttgagacacactttttgtagaatctacaagtggatatttggacctctctgaggatttcgttggaaacgggataactgcacctaactaaacggaagcattctcagaaactgctttgtgatgattgcattcacctcacagagttgaacattcctattgatagagcagtttggaaacactcttgttgtggaatgtgcaagtggagatttggagcgctttgaggcctgtggtagtaaagggaatagcttcatagaaaaactagacagatgcattctcaggaactttttggtgatgtttgtattcaactcccagagttgaactttcctttggaaagagcagctatgaaacactctttttctagaatctgcaagtggacgtttggagggctttgtggtttgtggtggaaaaggaaatatcttcacctaaatactagatagaagcattctcagaagcttctctgtgatgactgcattcaactcacggagttgaacactccttttgagagcgcagttttgaaactctctttctgtggcatctgcaaggggacatgtagacctctttgaagatttcgttggaaacggaatcatcttcacataaaaactatacagaagcagtctcagaatcttctttgtgatgtttgcattcaaatcccagagttgaactttcctttcaaagttcacgtttgaaacactctttttgcaggatctacaagtggatatttggaccactctgtgtccttcgttcgaaacgggtatatcttcacatgacatctagacagaagctttctcagaaaattctttgggatgattgagtggaactcacagaggtgaacattccttgcgatgtagcagtttagaaacacactttctgcagaatctgcaagtgcatatttggacctctctgaggaattcgttggaaacgggataatttcagctgactaaacagaagcattctcagaaccttcttcgtgatgtctgcattcaactcacagtgtggaacctttctttgatagttcaggtttgaaacactctttttgtagaaactgcaaggggataattgcacttctttgaggcctaccgtagtaaaggaaataacttcctataaaaagaagacagaagcattctcagaaccctcttcgtgatgtttgcattcaactcacagtgctgaaactttctttgatagttcagctttgaaacactctttttgtagaaactgcaagtggatacttggtcctctctgaggatttcgttggaaaagggataaaccgcacagaactaaacagaagcattctcagaaccttcttcgtgatgtttgcattcaactcacagtgttgaacctttctttgatagttcaggtttgaaacggtctttctgcagaaactgcaagtagatatttggaccgctctgaggatttcgttggaaacgggataacccgcacagaactaaaacagaagcattcacagaaaactcttggtgacgactgagtttaactcacagagctgaacattcctttggatggagcagtttcgaaacacactatttgtagaatgtgcaagtggatatttaggcctctctgaggatttcgttggaaacgggttaaaccgcacagaactaaacagaagcattctcagaaactactttgtgatgattgcattcaagtcacagtagttgaacattccctttgacagagcagtttggaaactctctttgtgtagaatctgcaagtggagatatggaccgctttgaggcctatggtagtaaaggaaatagcttcatataaaagctagacagtagcattctcagaaacttctttgtgatgcttgcattcaactcacagagttgaactttcctttcgagagagaagctttgaaacactctttttccagaatctgcaagtggacatttggagggctttgaggcctgtggtagaaaaggaattaacttcccgtaaaagctagatagaagcattgtcagaaacttctttgtgatgattgcattcaactcacagagttgaaggttccttttcaaacagcagtttccaatcactctttctgtggaatctgcaagtggatatttggacctattttgaagatttcgttggaaacgggagaatcttcacagaaaagctaaacagaagcattctcagaaacttctctgtgatgtttgtgttcaactcccagagtttcacgttgcttttcatagagtagttctgaaacatgcttttcgtagtgtctgcaagtggacatttggagcgctttcaggcctgtggtggaaaacgaattatggtcacataaaaactggagagaagccttctcagaaacttctctgtgatgattgcattcaactcacagagttgaaccctcctatggatagagcagtgttgaaactctctttttgtggaatctgcaagtggatatgtggacctctccgaagatgtctttggaaacgggaatatcttcacataaaaactaaacagaagcattctcagaaacttcttggtgatgtttgcattcaaatcccagagttgaaccttcctttgatagttcaggtttgaaacactctttctgtaggatctgcaagtggctatttggaccactctgtggccttcgttcgaaacgggtatatcttcgcataaaatctagacagaagcattctcagaaaatactttgtgatgattgagtttaaatcacagagctgaccattcctttggatggagcaggtttgagacacactttttgtagaatctacaagtggatatttggacctctctgaggatttcgttggaaacgggataactgcacctaactaaacggaagcattctcagaaactgctttgtgatgattgcattcacctcacagagttgaacattcctattgatagagcagtttggaaacactcttgttgtggaatgtgcaagtggagatttggagcgctttgaggcctatggtagtaaagggaatagcttcatagaaaaactagacagatgcattctcaggaactttttggtgatgtttgtattcaactcccagagttgaactttcctttggaaagagcagctatgaaacactctttttctagaatctgcaagtggacgtttggagggctttgtggtttgtggtggaaaaggaaatatcttcacctaaatactagatagaagcattctcagaagcttctctgtgatgactgcattcaactcacggagttgaacactccttttgagagcgcagttttgaaactctctttctgtggcatctgcaaggggacatgtagacctctttgaagatttcgttggaaacggaatcatcttcacataaaaactatacagaagcagtctcagaatcttctttgtgatgtttgcattcaaatcccagagttgaactttcctttcaaagttcacgtttgaaacactctttttgcaggatctacaagtggatatttggaccactctgtgtccttcgttcgaaacgggtatatcttcacacgacatctagacagaagctttctcagaaaattctttgggatgattgagtggaactcacagagctgaacattccttgcgatgtagcagtttagaaacacactttctgcagaatctgcaagtgcatatttggacctctctgaggaattcgttggaaacgggataatttcagctgactaaacagaagcattctcagaaccttcttcgtgatgtctgcattcaactcacagtgtggaacctttctttgatagttcaggtttgaaacactctttttgtagaaactgcaaggggataattgcacttctttgaggcctaccgtagtaaaggaaataacttcctatagaaagaagacagaagcattctcagaaccctcttcgtgatgtttgcattcaactcacagtgctgaacctttctttgatagttcagctttgaaacactcttcttgtagaaactgcaagtggatatttggtcctctctgaggatttcgttggaaacgggataaaccgcacagaactaaacagaaattctcagagccctcttcgtgatgtttgcattcaactcacagtgctgaacctttctttgatagtgcagctttgaaacactctttttgtagaaactgcaagtggatatttggtcctctctgaggatttcgttggaaacgggataaaccgcacagaactaaaacagaagcattctaagaaccttcttcgtgatgtttgcattcaactcacagtgttgaacctttctttgatagttcaggtttgaaacggtctttctgtagaaactgcaagtagatatttggacctctctgaggatttcgttggaaacgggataacccgcacagaactaaaacagaagcattcacagaaaactcttggtgacgactgagtttaactcacagagctgaacattcctttggatttagcagtttcgaaacacactatttgtagaatctgcaagtggatatttggtcctctctgaggatttcgttggaaacgggataaaccgcacagaactaaacagaagcattctcagaaactactttgtgatgattgcattcaagtcacagagttgaacattccctttgacagagcagtttggaaactctctttgtgtagaatctgcaagtggagatatggaccgctttgaggcctattttagtaaaggaaatagcttcatataaaagctagacagtagcattctcagaaacttctttgtgatgcttgcattcaactcacagagttgaactttcctttcgagagagaagctttgaaacactctttttccagaatctgcaagtggacatttggagggctttgaggcctgtggtggaaaaggaattatcttcccgtaaaagctagatagaagcattgtcagaaacttctttgtgatgattgcattcaagtcacagagttgaaggttccttttcaaagagcagtttccaatcacactttctgtggaatctgcaagtggatatttggacctctttgaagatttcgttggaaacgggagaatcttcacagaaaagctaaacagaagcattctcagaaacttctctgtgatgtttgtgttcaactcccagagtttcacattgcttctcatagagtagttctgaaacatgcttttcatactgtctgcaagtggacatttggagcgctttcaggcctgtggtggaaaacgaattatggtcacataaaaactggagagaagccttctcagaaacttctctgtgatgattgcattcaactcacagagttgaaccctcctatggatagagcagtgttgaaactctctttttgtggaacctgcaagtggatatgtggacctctccgaagatgtctttggaaacgggaatatcttcacataaaaactaaacagaagcattctcagaaacttcttggtgatgtttgcattcaaatcccagagttgaaccttcctttgatagttcaggtttgaaacactgtttctgtaggatctgcaagtggctatttggaccactctgtggccttcgttcgaaacgggtatatcttcgcataaaatctagacagaagcattctcagaaaatactttgtgatgattgagtttaactcacagagctgaacattcctttggatggagcaggtttgagacacactttttgtagaatctacaagtggatatttggacctctctgaggatttcgttggaaacgcgataactgcacctaactaaacggaagcattctcagaaactgctttgtgatgattgcattcacctcacagagttgaacattcgtattgatagagcagtttggaaacactcttcttgtggaatgtgcaagtggagatttggagcgctttggggcctatggtagtaaagggaatagcttcatagaaaaactagacagatgcattctcaggaactttttggtgatgtttgtattcaactcccagagttgaactttcctttggaaagagcagctatgaaacactctttttctagaatctgcaagtggacgtttggagggctttgtggtttgtggtggaaaaggaaatatcttcacctaaatactagatagaagcattctcagaagcttctctgtgatgactgcattcaactcacggagttgaacactccttttgagagcacagttttgaaactctctttatgtggcatctgcaaggggacatgtagacctctttgaagatttcgttggaaacggaatcatcttcatataaaaactatacagaagcagtctcagaatcttctttgtgatgtttgcattcaaatccccgagttgaactttcctttcaaagttcacgtttgaaacactctttttgcaggatctacaagtggatatttggaccactctgtgtccttcgttcgaaacgggtatatcttcacatgacatctagacagaagctttctcagaaaattctttgggatgattgagttgaactcacagagctgagcattccttgcgatgtagcagtttagaaacacactttctgcagaatctgcaagtgcatatttggacctctgtgaggaattcgttggaaacgggataatttcagctgactaaacagaagcattctcagaaccttcttcgtgatgtctgcattcaactcacagtgtggaacctttctttgatagttcaggtttgaaacactctttttgtagaaactgcaaggggataattgcactctttgaggagtaccgtagtaaaggaaataacttcctataaaaagaagacagaagcattctcagaaccctcttcgtgatgtttgcattcaactcacagtgctgaacctttctttgatagttcagctttgaaacactctttttgtagaaactgcaagtggatatttggtcctctctgagcatttcgttggaaacgggataaactgcacagaactaaacagaagcattctcagaaccttcttcgtgatgtttgcattcaactcacagtgttgaacctttctttgatagttcaggtttgaaacggtctttctgtagaaactgcaagtagatatttggaccgctctgaggatttcgttggaaatgggataacccgcacagaactaaaacagaagcattcacagaaaactcttggtgacgactgagtttaactcacagagctgaacattcctttggatggagcagtttcgaaacacactatttgtagaatgtgcaagtggatatttaggcctctctgaggatttcgttggaaacgggataaaccgcacagaactaaacagaagcattctcagaaactactttgtgatgattgcattcaagtcacagggttgaacattccctttgacagagcagtttggaaactctctttgtgtagaatctgcaagtggagatatggaccgctttgaggcctatggtagtaaaggaaatagcttcatataaaagctagacagtagcattctgagaaacttctttgtgatgcttgcattcaactcacagagttgaactttcctttcgagagagaagctttgaaacactctttttccagaatctgcaagtggacatttggagggctttgaggcctgtggtggaaaaggaattatcttcccgtaaaagctagatagaagcattgtcagaaacttctttgtgatgattgcattcaactcacagagttgaaggttccttttcaaacagcagtttccaatcactctttctgtggaatctgcaagtggatatttgggcctctctgaggatttcgttggaaacgggataaaacgcacagaactaaaacagaagcattctcagaaacttctctgtgatgtttgtgttcaactcccagagtttcacgttgcttttcatagagtagttctgaaacatgcttttcgtagtgtctgcaagtggacatttggagcgctttcaggcctgtggtggaaaacgaattatggtcacataaaaactggagagaagccttctcagaaacttctctgtgatgattgcattcaactcacagagttgaaccctcctatggatagagcagtgttgaaactctctttttgtggaatctgcaagtggatatgtggacctctccgaagatgtctttggaaacgggaatatcttcacataaaaactaaacagaagcattctcagaaacttcttggtgatgtttgcattcaaatcccagagttgaaccttcctttgatagttcaggtttgaaacactctttctgtaggatctgcaagtggctatttggaccactctgtggccttcgttcgaaacgggtatatcttcgcataaaatctagacagaagcattctcagaaaatactttgtgatgattgagtttaaatcacagagctgaccattcctttggatggagcaggtttgagacacactttttgtagaatctacaagtggatatttggacctctctgaggatttcgttggaaacgggataactgcacctaactaaacggaagcattctcagaaactgctttgtgatgattgcattcacctcacagagttgaacattcctattgatagagcagtttggaaacactcttgttgtggaatgtgcaagtggagatttggagcgctttgaggcctatggtagtaaagggaatagcttcatagaaaaactagacagatgtattctcaggaactttttggtgatgtttgtattcaactcccagagttgaactttcctttggaaagagcagctatgaaacactctttttctagaatctgcaagtggacgtttggagggctttgtggtttgtggtggaaaaggaaatatcttcacctaaatactagatagaagcattctcagaagcttctctgtgatgactgcattcaactcacggagttgaacactccttttgagagcgcagttttgaaactctctttctgtggcatctgcaaggggacatgtagacctctttgaagatttcgttggaaacggaatcatcttcacataaaaactatacagaagcagtctcagaatcttctttgtgatgtttgcattcaaatcccagagttgaactttcctttcaaagttcacgtttgaaacactctttttgcaggatctacaagtggatatttggaccactctgtgtccttcgttccaaactggtatatcttcacatgacatctagacagaagcattgtcagaaacttctttgtgatgattgcattcaactcacagagttgaaggttccttttcaaacagcagtttccaaacaccctttctgtggaatctgcaagtgcatatttggacctctctgaggaattcgttggaaacgggataatttcagctgactaaacagaagcattctcagaaccttctctgtgatgtttgtgttcaactcccagagtttcacattgcttttcatagagtagttctgaaacatgcttttcgtagtgtctgcaagtggacatttggagcgctttcaggcctgtggtggaaaacgaattatggtcacataaaaactggagagaagccttctcagaaacttctctgtgatgattgcattcaactcacagagttgaaccctcctatggatagagcagtgttgaaactctctttttgtggaatctgcaagtggatatgtggacctctccgaagatgactttggaaacgggaatatcttcacataaaaactaaacagaagcagtctcagaaacttctttgtgatgtttgccttcaaatcccagagttgaaccttcctttgatagttcaggtttgaaaccctctttttgtaggatctgcaagtggatatttggaccactctgtggccttcgttctaaacgggtatatcttcacataaaatctagacagaagcattctcagaaaatactttgtgatgattgagttgaactcgcagaggtgaacattcctttggatggagcaggtttgagacacactttttgtagaatctacaagtggatatttggacctctctgaggatttcgttggaaacgggataactgcacctaactaaacggaagcattctcagaaactgctttgtgatgattgcattcacctcacagagttgaacattcctattgatagagcagtttggaaacaatcttgttgtggaatgtgcaagtggagatttggagcgctttgtggcctatggtagtaaagggaatagcttcataaaaaaactagacagatgcattctcaggaactttttggtgatgtttgtattcaactcccagagttgaactttcctttggaaagagcagctatgaaacactctttttctagaatctgcaagtggacgtttggagggctttgtggtttgtggtggaaaaggaaatatcttcacctaaatcctagagagaagcattctcagaagcttctctgtgatgactgcattcaactcacggagttgaacactccttttgagagcgcagttttgaaactctctttctgtggcatctgcaaggggacatgttgacctctttgaagatttcgttggaaacggaatcatcttcgcataaaaactatacagaagcagtctcagaatcttctttgtgatgtttgcattcaaatcccagagttgaactttcctttcaaagttcacgtttgaaacactctttttgcaggatctacaagtggatatttggaccactctgtgtccttcgttcgaaacgggtataacttcacacgacatctagacagaaggtttctcagaaaattctttgggatgattgagtggaactcacagagctgaacattccttgcgatgtagcagtttagaaacacactttctgcagaatctgcaagtgcatatttggacctctctgaggaattcgttggaaacgggataatttcagctgactaaacagaagcattctcagaaccttcttcgtgatgtctgcattcaactcacagtgtggaacctttctttgatagttcaggtttgaaacactctttttgtagaaactgcaaggggataattgcacttctttgaggcctaccgtagtaaaggaaataacttcctatagaaagaagacagaagcattctcagaaccctcttcgtgatgtttgcattcaactcacagtgctgaacctttctttgatagttcagctttgaaacactcttcttgtagaaactgcaagtggatatttggtcctctctgaggatttcgttggaaacgggataaaccgcacagaactaaacagaagaattctcagagccctcttcgtggtgtttgcattcaactcacagtgctgaacctttctttgatagtgcagctttgaaacactctttttgtagaaactgcaagtggatatttggtcctctctgaggatttcgttggaaacgggataaaccgcacagaactaaaacagaagcattcacagaaaactcttggtgacgactgagtttaactcacagagctgaacattcctttggatggagcagtttcgaaacacactatttgtagaatctgcaagtggatatttgggcctctctgaggatttcgttggaaacgggataaaacgcacagaactaaaacagaagcattctcagaaactactttgtgatgattgcattcaagtcacagagttgaacattccctttgacagagcagtttggaaactctctttgtgtagaatctgcaagtggagatatggaccgctttgaggcctatggtagtaaaggaaatagcttcatataaaagctagacagtagcattctcagaaacttctttgtgatgcttgcattcaactcacagagttgaactttcctttcgagagagaagctttgaaacactctttttccagaatgtgcaagtggacatttggggagctttgaggcctgtggtggaaaaggaattatcttcccgtaaaagctagatagaagcattgtcagaaacttctttgtgatgactgcattcaactcacagagttgaaggttccttttcaaacagcagtttccaatcactctttctgtggaatctgcaagtggatatttcgacctctttgaagatttcgttggaaacgggagaatcttcacagaaaagctaaacagaagcattctcagaaacttctctgtgatgtttgtgttcaactcccagagtttcacgttgcttttcatagagtagttctgaaacatgcttttcgtagtgtctgcaagtggacatttggagcgctttcaggcctgtggtggaaaacgaattatggtcacataaaaactggagagaagccttctcagaaacttctctgtgatgattgcattcaactcacagagttgaaccctcctatggatagagcagtgttgaaactctctttttgtggaatctgcaagtggatatgtggacctctccgaagatgtctttggaaacgggaatatcttcacataaaaactaaacagaagcattctcagaaacttcttggtgatgtttgcattcaaatcccagagttgaaccttcctttgatagttcaggtttgaaacactctttctgtaggatctgcaagtggctatttggaccactctgtggccttcgttcgaaacgggtatatcttcgcataaaatctagacagaagcattctcagaaaatactttgtgatgattgagttaaaatcacagagctgaacattcctttggatggagcaggtttgagacacactttttgtagaatctacaagtggatatttggacctctctgaggatttcgttggaaacgggataactgcacctaactaaacggaagcattctcagaaactgctttgtgatgattgcattcacctcacagagttgaacattcctattgatagagcagtttggaaacactcttgttgtggaatgtgcaagtggagatttggagcgctttgaggcctatggtagtaaagggaatagcttcatagaaaaactagacagatgcattctcaggaactttttggtgatgtttgtattcaactcccagagttgaactttcctttggaaagagcagctatgaaacactctttttctagaatctgcaagtggacgtttggagggctttgtggtttgtggtggaaaaggaaatatcttcacctaaatactagatagaagcattctcagaagcttctctgtgatgactgcattcaactcacggagtctgaacactccttttgagagcgcagttttgaaactctctttctgtggcatctgcaaggggacatgtagacctctttgaagatttcgttggaaacggaatcatcttcacataaaaactatacagaagcagtctcagaatcgtctttgtgatgtttgcattcaaatcccagagttgaactttcctttggaagttcacgtttgaaacactctttttgcaggatctacaagtggatatttggaccactctgtgtccttcgttcgaaacgggtatatcttcacatgacatctagacagaagctttcacagaaaattctttgggatgattgagtggaagtcacagagcttaacattccttgcgatgtagcagtttagaaacacactttctgcagaatctgcaagtgcatatttggacctctctgaggaattcgttggaaacggaataatttcagctgactaaacagaagcattctcagaaccttcttcgtgatgtctgcattcaactcacagtgtggaacctttctttgatagttcaggtttgaaacactctttttgtagaaactgcacagggataattgcacttctttgaggcctaccgtagtaaaggaaataacttcctatagaaagaagacagaagcattctgagaaccttcttagtgatgtctgcattcaactcacagtgtggaacctttctttgatagttcaggtttgaaacactcttcttgtagaaactgcaaatggatatttggtcctctctgaggatttcgttggaaacgggataaaccgcacagaactaaacggaagcattctcagaaccttcttcgtgatgtttgcattcaactcacagtgttgaacctttctttgatagttcaggtttgaaacggtctttctgtagaaactgcaagtagatatttggacctctctgaggatttcgttggaaacgggataaaccgcacagaactaaacagaagcattcacagaaaactcttggtgacgactgagtttaactcacagagctgaacattcctttggatggagcagtttcgaaacacactatttgtagaatgtgcaagtggatatttgggcctctctgaggatttcgttggaaacgggataaaccgcacagaactaaacagaagcattctcagaaactactttgtgatgattgcattcaagtcacagagttgaacattccctttgacagagcagtttggaaactctctttgtgtagaatctgcaagtggagatatggaccgctttgaggcctatggtagtaaaggaaatagcttcatataaaagctagacattagcattctcagaaacttctttgtgatgcttgcattcaactcacagagttgaactttcctttcgagagagaagctttgaaacactctttttccagaatctgcaagtggacatttggagggctttgaggcctgtggtggaaaaggaattatcttcccgtaaaagctagatagaagcattgtcagaaacttctttgtgatgattgcattcaagtcacagagttgaaggttccttttcaaagagcagtttccaatcactctttctgtggaatctgcaagtggatatttggacctctttgaagatttcgttggaaacgggagaatcttcacagaaaagctaaacagaagcattctcagaaacttctctgtgatgtttttgttcaactcccagagtttcacattgcttctcatagagtagttctgaaacatgcttttcgtagtgtctgcaagtggacatttggagcgctttcaggtctgtggtggaaaacgaattatggtcacataaaaactggagagaagccttctcagaaacttctctgtgatgattgcattcaactcacagagttgaaccctcctatggatagagcagtgttgaaactctctttttgtggaatctgcaagcggatatgtggacctctccgaagatgtctttggaaacgggaatatcttcacataaaaactaaacagaagcattctcagaaacttcttggtgatgtttgcattcaaatcccagagttgaaccttcctttgatagttcaggtttgaaacactctttctgtaggatctgcaagtggctatttggaccactctgtggccttcgttcgaaacgggtatatcttcgcataaaatctagacagaagcattctcagaaaatactttgtgatgattgagttaaaatcacagagctgaacattcctttggatggagcaggtttgagacacactttttgtagaatctacaagtggatatttggacctctctgaggatttcgttggaaacgggataactgcacctaactaaacggaagcattctcagaaactgctttgtgatgattgcattcacctcacagagttgaacatccctattgatagagcagtttggaaacactcttgttgtggaatgtgcaagtggagatttggagcgctttgaggcctgtggtagtaaagggaatagcttcatagaaaaactagacagatgcattctcaggaactttttggtgatgtttgtattcaactcccagagttgaactttcctttggaaagagcagctatgaaacactctttttctagaatctgcaagtggacgtttggagggctttgtggtttgtggtggaaaaggaaatatcttcacctaaatactagatagaagcattctcagaagcttctctgtgatgactgcattcaactcacggagttgaacactccttttgagagcgcagttttgaaactctctttctgtggcatctgcaaggggacatgtagacctctttgaagatttcgttggaaacggaatcatcttcacataaaaactatacagaagcagtctcagaatcttctttgtgatgtttgcattcaaatcccagagttgaactttcctttcaaagttcacgtttgaaacactctttttgcaggatctacaagtggatatttggaccactctgtgtccttcgttcgaaacgggtatatcgtcacatgacatctagacagaagctttctcagaaaattctttgggatgattgagtggaactcacagagctgaacattccttgcgatgtagcattttagaaacacactttctgcagaatctgcaagtgcatatttggacctctctgaggaattcgttggaaacgggatattttcagctgactaaacagaagcattctcagaaccttcttcgtgatgtctgcattcaactcacagtgtggaacctttctttgatagttcaggtttgaaacactctttttgtagaaactgcaaggggataattgcacttctttgaggcctaccgtagtaaaggaaataacttcctatagaaagaagacagaagcattctcagaaccctcttcgtgatgtttgcattcaactcacagtgctgaacctttctttgatagtgcagctttgaaacactcttcttgtagaaactgcaagtggatatttggtcctctctgaggatttcgttggaaacgggataaaccgcacagaactaaacagaagcattctcagaaccttcttcgtgatgtttgcattcaactcacagtgttgaacctttctttgatagttcaggtttgaaacggtctttctgtagaaactgcaagtagatatttggacctctctgaggatttcgttggaaacgggataaaccgcacagaactaaaacagaagcattcacagaaaactcttggtgacgactgagtttaactcacagagctgaacattccgttggatggagcagtttcgaaacacactatttgtagaatctgcaagtggatatttgggcctctctgaggatttcgttggaaacgggataaaacgcacagaactaaaacagaagcattctcagaaactactttgtgatgattgcattcaagtcacagagttgaacattccctttgacagagcagtttggaaactctctttgtgtagaatctgcaagtggagatatggaccgctttgaggcctatggtagtaaaggaaatagcttcatataaaagctagacagtagcattctcagaaacttctttgtgatgcttgcattcaactcacagagttgaactttcctttcgagagagaagctttgaagcactctttttccagaatgtgcaagtggacatttggggagctttgaggcctgtggtggaaaaggaattatcttcccgtaaaagctagatagaagcattgtcagaaacttctttgagatgattgcattcaactcacagagttgaaggttccttttcaaacagcagtttccaatcactctttctgtggaatctgcaagtggatatttcgacctctttgaagatttcgttggaaacgggagaatcttcacagaaaagctaaacagaagcattctcagaaacttctctgtgatgtttgtgttcaactcccagagtttcacgttgcttttcatagagtagttctgaaacatgcttttcgtagtgtctgcaagtggacatttggagcgctttcaggcctgtggtggaaaacgaattatggtcacataaaaactggagagaagccttctcaggaaacttctctgtgatgattgcattcaactcacagagttgaaccctcctatggatagagcagtgttgaaactctctttttgtggaatctgcaagtggatatgtggacctctccgaagatgtctttggaaacgggaatatcttcacataaaaactaaacagaagcattctcagaaacttcttggtgatgtttgcattcaaatcccagagttgaaccttcctgtgatagttcaggtttgaaacactctttttgtaggatctgcaagtggatatttggaccactctgtggccttcgttcgaaacgggtacatcttcacataaaatctagacagaagcattctcagaaaatactttgtgatgattgagtttaactcacagagctgaacattcctttggatggagcaggtttgagacacactttttgtagaatctacaagtggatatttggacctctctgaggatttcgttggaaacgcgataactgcacctaactaaacggaagcattctcagaaactgctttgtgatgattgcattcacctcacagagttgaacattcctattgatagagcagtttggaaacactcttgttgtggaatgtgcaagtggagatttggagcgctttgaggcctatggtagtaaagggaatagcttcatagaaaaactagacagatgcattctcaggaactttttggtgatgtttgtattcaactcccagagttgaactttcctttggaaagagcagctatgaaacactctttttctagaatctgcaagtggacgtttggagggctttgtggtttgtggtggaaaaggaaatatcttcacctaaatactagatagaagcattctcagaagcttctctgtgatgactgcattcaactcacggagttgaacactccttttgagagcgcagttttgaaactccctttctgtggcatctccaaggggacatgtagacctctttgaagatttcgttggaaacggaatcatcttcacataaaaactatacagaagcagtctcagaatcttctttgtgatgtttgcattcaaatccccgagttgaactttcctttcaaagttcacgtttgaaacactctttttgcaggatctacaagtggatatttggaccactctgtgtccttcgttcgaaacgggtatatcttcacatgacatctagacagaagctttctcagaaaattctttgggatgattgagttgaactcacagagctgagcattccttgcgatgtagcagtttagaaacacactttctgcagaatctgcaagtgcatatttggacctctgtgaggaattcgttggaaacgggataatttcagctgactaaacagaagcattctcagaaccttcttcgtgatgtctgcattcaactcacagtgtggaacctttctttgatagttcaggtttgaaacactctttttgtagaaactgcaaggggataattgcactctttgaggagtaccgtagtaaaggaaataacttcctctaaaaagaagacagaagcattctcagaaccctcttcgtgatgtttgcattcaactcacagtgctgaacctttctttgatagttcagctttgaaacactctttttgtagaaactgcaagtggatatttggtcctctctgagcatttcgttggaaacgggataaactgcacagaactaaacagaagcattctcagaaccttcttcgtgatgtttgcattcaactcacagtgttgaacctttctttgatagttcaggtttgaaacggtctttctgtagaaactgcaagtagatatttggacctctctgaggatttcgttggaaacgggataacccgcacagaactaaaacagaagcattcacagaaaactcttggtgacgactgagtttaactcacagagctgaacattcctttggatggagcagtttcgaaacacactatttgtagaatgtgcaagtggatatttaggcctctctgaggatttcgttggaaacgggataaaccgcacagaactaaacagaagcattctcagaaactactttgtgatgattgcattcaagtcacagagttgaacattccctttgacagagcagtttggaaactctctttctgtagaatctgcaagtggagatatggaccgctttgaggcctatggtagtaaaggaaatagcttcatataaaagctagacagtagcattctcagaaacttctttgtgatgcttgcattcaactcacagagttgaactttcctttcgagagagaagctttgaaacactctttttccagaatctgcaagtggacatttggagggctttgaggcctgtggtggaaaaggaattatcttcccgtaaaagctagatagaagcattgtcagaaacttctttgtgatgattgcattcaagtcacagagttgaaggttccttttcaaagagcagtttccaatcactctttctgtggaatctgcaagtggatatttggacctctttgaagatttcgttggaaacgggagaatcttcacagaaaagctaaacagaagcattctcagaaacttctctgtgatgtttgtgttcaactcccagagattcacattgcttctcatagagtagttctgaaacatgcttttcgtagtgtctgcaagtggacatttgcagcgctttcaggcctgtggtggaaaacgaattatggtcacataaaaactggagagaagccttctcagaaacttctctgtgatgattgcattcaactcacagagttgaaccctcctatggatagagcagtgttgaaactctctttttgtggaatctgcaagcggatatgtggacctctccgaagatgtctttggaaacgggaatatcttcacataaaaactaaacagaagcattctcagaaacttcttggtgatgtttgcattcaaatcccagagttgaaccttcctttgagagttcaggtttgaaacactctttttgtaggatctgaaagtggatatttggaccactctgtggccttcgttcgaaacgggtacatcttcgaataaaatctagacagaagcattctcagaaaatactttgtgatgattgagttgaactcacagagctgaacattcctttggatggagcaggtttgagacacactttttgtggaatctacaagtggatatttggacctctctgaggatttcgttggaaacgggataactgcacctaactaaacggaagcattctcagaaactgctttgtgatgattgcattcacctcacagagttgaacattcctattgatagagcagtttggaaacactcttgttgtggaatgtgcaagtggagatttggagcgctttgaggtctatggtagtaaagggaatagcttcatagaaaaactagacagatgcattctcaggaactttttggtgatgtttgtattcaactcccagagttgaactttcctttggaaagagcagctatgaaacaatctttgtctagaatctgcaagtggacgtttggagggctttgtggtttgtggtggaaaaggaaatatcttcacctaaatactagatagaagcattctcagaagcttctctgtgatgactgcattcaactcacggagttgaacactccttttgagagcgcagttttgaaactctctttctgtggcatctgcaaggggacatgtagacctctttgaagatttcgttggaaacggaatcatcttcacataaaaactatacagaagcagtctcagaatcttttttgtgatgtttgcattcaaatcccagagttgaactttcctttcaaagttcacgtttgaaacactctttttgcaggatctacaagtggatatttggaccactctgtgtccttcgttcgaaacgggtatatcttcacatgacatctagacagaagctttctcagaaaattctttgggatgattgagttgaactcacagagctgaacattccttgcgatgtagcagtttagaaacacactttctgcagaatctgcaagtgcatatttggacctctctgaggaattcgttggaaacgggataatttcagctgactaaacagaagcattctcagaaccttcttcgtgatgtctgcattcaactcacagtgtggaagctttctttgatagttcaggtttgaaacactctttttgtagaaactgcaaggggataatggcacttctttgaggcctaccgtagtaaaggaaataacttcctatagaaagaagacagaagcattctcagaaccctcttcgtgatgtttgcattcaactcacagtgctgaacctttctttgatagttcagctttgaaacactcttcttgtagaaactgcaagtggatatttggtcctctctgaggatttcgttggaaacgggataaacccgcacagaactaaacagaagcattctcagagccctcttcgtgatgtttgcattcaactcacagtgctgaacctttctttgatagtgcagctttgaaacactctttttgtagaaactgcaagtggatatttggtcctctctgaggatttcgttggaaacgggataaactgcaaagaactaaaacagaagcattcacagaaaactcttggtgacgactgagtttaactcacagagctgaacattcctttggatggagcagtttcgaaacacactatttgtagaatctgcaagtggatatttgggcctctctgaggatttcgttggaaacgggataaaccgcacagaagtaaacagaagcattctcagaaactactttgtgatgattgcattcaagtcacagagttgaacattccctttgacagagcagtttggaaactctctttgtgtagaatctgcaagtggagatatggaccgctttgaggcctatggtagtaaaggaaatagcttcatataaaagctagacagtagcattctgagaaacttctttgtgatgcttgcattcaactcacagagttgaactttcctttcgagagagaagctttgaaacactctttttccagaatctgcaagtggacatttggagggctttgaggcctgtggtggaaaaggaattatcttcccgtaaaagctagatagaagcattgtcagaaacttctttgtgatgattgcattcaactcacagagttgaaggttccttttcaaagagcagtttccaatcactctttctgtggaatctgcaagtggatatttggacctattttgaagatttcgttggaaacgggagaatcttcacaggaaagctaaacagaagcattctcagaaacttctctgtgatgtttgtgttcaactcccagagtttcacattgcttttcatagagtagttctgaaacatgcttttcgtagtgtctacaagtggacatttggagcgctttcaggcctgtggtggaaaacgaattatggtcacataaaaactggagagaagccttctcagaaacttctctgtgatgattgcattcaactcacagagttgaaccctcctatggatagagcagtgttgaaactctctttttgtggaatctgcaagtggatatgtggacctctccgaagatgtctttggaaacgggaatatcttcacataaaaactaaacagaagcattctcagaaacttcttggtgatgtttgcattcaaatcccagagttgaaccttcctttgctagttcaggtttgaaacactctttttgtaggatctgcaagtggatatttggaccactctgtggccttcgttcgaaacgggtatatcttcgcataaaatctagacagaagcattctcagaaaatactttgtgatgattgagtttaactcacagagctgaacattcctttggatggagcaggtttgagacacactttttgtagaatctacaagtggatatttggacctctctgaggatttcgttggaaacgggataactgcacctaactaaacggaagcattctcagaaactgctttgtgatgattgcattcacctcacagagttgaacattcctattgatagagcagtttggaaacactcttgttgtggaatgtgcaagtggagatttggagcgctttgaggcctatggtagtaaagggaatagcttcatagaaaaactagacagatgcattctcaggaactttttggtgatgtttgtattcaactcccagagttgaactttcctttggaaagagcagctatgaaacactctttttctagaatctgcaagtggacgtttggagggctttgtggtttgtggtggaaaaggaaatatcttcacctaaatactagatagaagcattctcagaagcttctctgtgatgactgcattcaactcacggagttgaacactccttttgagagcgcagttttgaaactctctttctgtggcatctgcaaggggacatgtagacctctttgaagatttcgttggaaacggaatcatcttcacataaaaactatacagaagcagtctcagaatcttctttgtgatgtttgcattcaaatcccagagttgaactttcctttcaaagttcacgtttgaaacactctttttgcaggatctacaagtggatatttggaccactctgtgtccttcgttcgaaacgggtatatcttcacacgacatctagacagaagctttctcagcaaaattctttgggatgattgagttgaactcacagagctgaacattccttgcgatgtagcagtttagaaacacactttctgcagaatctgcaagtgcatatttggacctctctgaggaattcgttggcaacgggataatttcagctgactaaacagaagcattctcagaaccttcttcgtgatgtctgcattcaactcacagtgtggaacctttctttgatagttcacgtttgaaacactccttttgtagaaactgcaaggggataattgcacttctttgaggcctaccgtagtaaaggaaataacttcctatagaaagaagacagaagcattctcagaaccctcttcgtgatgtttgcattcaactcacagtgctgaacctttctttgatagttcagctttgaaacactcttcttgtagaaactgcaagtggatatttggtcctctctgaggatttcgttggaaacgggataaaccgcacagaactaaacagaagcattctcagaaccttcttcgtgatgtttgcattcaactcacagtgttgaacctttctttgatagttcaggtttgaaacggtctttctgtagaaactgcaagtagatatttggacctctctgaggatttcgttggaaacgggataacccgcacagaactaaaacagaagcattcagaaaaaactcttggtgacgactgagtttaactcacagagctgaacattcctttggatggagcagtttcgaaacacactatttgtagaatgtgcaagtggatatttgggcctctctgaggatttcgttggaaacgggataaaccgcacagaactaaacagaagcattctcagaaactactttgtgatgattgcattcaagtcacagagttgaacattccctttgacagagcagtttggaaactctctttgtgtagaatctgcaagtggagatatggaccgctttgaggcctatggtagtaaaggaaatagcttcatataaaagctagacagtagcattctgagaaacttctttgtgatgcttgcattcaactcacagagttgaactttcctttcgagagagaagctttgaaacactctttttccagaatctgcaagtggacatttggagggctttgaggcctgtggtggaaaaggaattatcttcccgtaaaagctagatagaagcattgtcagaaacttctttgtgatgattgcattcaactcacagagttgaaggttccttttcaaacagcagtttccaatcactctttctgtggaatctgcaagtggatatttgggcctctctgaggatttcgttggaaacgggataaaacgcacagaactaaaacagaagcattctcagaaacttctctgtgatgtttgtgttcaactcccagagtttcacgttgcttttcatagagtagttctgaaacatgcttttcgtagtgtctgcaagtggacatttggagcgctttcaggcctgtggtggaaaacgaattatggtcacataaaaactggagagaagccttctcagaaacttctctgtgatgattgcattcaactcacagagttgaaccctcctatggatagagcagtgttgaaactctctttttgtggaatctgcaagtggatatgtggacctctccgaagatgtctttggaaacgggaatatcttcacataaaaactaaacagaagcattctcagaaacttcttggtgatgtttgcattcaaatcccagagttgaaccttcctttgatagttcaggtttgaaacactctttttgtaggatctgcaagtggctatttggaccactctgtggctttcgttcgaaacgggtatatcttcgcataaaatctagacagaagcattctcagaaaatactttgtgatgattgagtttaaatcacagagctgaccattcctttggatggagcaggtttgagacacactttttgtagaatctacaagtggatatttggacctctctgaggatttcgttggaaacgggataactgcacctaactaaacggaagcattctcagaaactgctttgtgatgattgcattcacctcacagagttgaacattcctattgatagagcagtttggaaacactgttgttgtggaatgtgcaagtggagatttggagcgctttgaggcctatggtagtaaagggaatagcttcatagaaaaactagacagatgcattctcaggaactttttggtgatgtttgtattcaactcccagagttgaactttcctttggaaagagcagctatgaaacactctttttctagaatctgcaagtggacgtttggagggctttgtggtttgtggtggaaaaggaaatatcttcacctaaatactagatagaagcattctcagaagcttctctgtgatgactgcattcaactcacggagttgaacactccttttgagagcgcagttttgaaactctctttctgtggcatctgcaaggggacatgtagacctctttgaagatttggttggaaacggaatcatcttcacataaaaactatacagaagcagtctcagaatcttctttgtgatgtttgcattcaaatcccagagttgaactttcctttcaaagttcacgtttgaaacactctttttgcaggatctacaagtggatatttggaccactctgtgtccttcgttcgaaacgggtataacttcacacgacatctagacagaagctttctcagaaaattctttgggatgattgagtggaactcacagagctgaacattccttgcgatggagcagtttagaaacacactttctgcagaatctgcaagtgcatatttggacctctctgaggaattcgttggaaacgggataatttcagctgactaaacagaagcattctcagaaccttcttcgtgatgtctgcattcaactcacagtgtggaacctttctttgatagttcaggtttgaaacactctttttgtagaaactgcaaggggataattgcacttctttgaggcctaccgtagtaaaggaaataacttcctatagaaagaagacagaagcattctcagaaccctcttcgtgatgtttgcattcaacacacagtgctgaacctttctttgatagttcagctttgaaacactcttcttgtagaaactgcaagtggatatttggtcctctctgaggatttcgttggaaacgggataaaccacacagaactaaacagaagcattctcagaaccttcttcgtgatgtttgcattcaactcacagtgttgaacctttctttgatagttcaggtttgaaacggtctttctgtagaaactgcaagtagatatttggacctctctgaggatttcgttggaaacgggataacccgcacagaactaaaacagaagcattcacagaaaactcttggtgacgactgagtttaactcacagagctgaacattcctttggatggagcagtttcgaaacacactatttgtagaatgtgcaagtggatatgtggtcctctctgaggatttcgttggaaacgggataaaccgcacagaactaaacagaagcattctcagaaactactttgtgatgattgcattcaagtcacagagttgaacattccctttgacagagcagtttggaaactctctttgtgtagaatctgcaagtggagatatggaccgctttgaggcctatggtagtaaaggaaatagcttcatataaaagctagacagtagcattctcagaaacttctttgtgatgcttgcattcaactcacagagttgaactttcctttcgagagagaagctttgaaacactctttttccagaatctgcaagtggacatttggagggctttgaggcctgtggtagaaaaggaattaacttcccgtaaaagctagatagaagcattgtcagaaacatcttcgtgatgatagcattcaactcacagagttgaagtttcctttataaacagcactttccaaacactctttctgtggaatctgcaagtggatatttggacctctttgaagatgtcgttggaaacgggataatgttcacagaaaagctaaacagaagcattctcagaaacttctctgtgatgtttgtgttcaactcccagagtttcacattgcttctcatagagtagttctgaaacatgcttttcatagtgtctgcaagtggacatttggagcgctttcaggcctgtggtggaaaacgaattatggtcacataaaaactggagagaagccttctgagaaacttctctgtgatgattgcattcaactcacagagttgaaacctcctatggatagagcagtgttgaaactctctttttgtggaatctgcaagtggatatgtggacccctccgaagatgtctttggaaacgggaatatcttcacataaaaactaaacagaagcattctcagaaacttcttggtgatgtttgcattcaaatcccagagttgaaccttcctttgatagttcaggtttgaaacactctttttgtaggatctgcaagtggatatttggaccactctgtggccttcgttcgaaacgggtacatcttcgcataaaatctagacagaagcattctcagaaaatactttgtgatgattgagtttaactcacagagctgaacattcctttggatggagcaggtttgagacacactttttgtagaatctacaagtggatatttggacctctgtgaggatttcgttggaaacgggataactgcacctaactaaacggaagcattctcagaaactgctttgtgatgattgcattcacctcacagagttgaacattcctattgatagagcagtttggaaacactcttgttgtggaatgtgcaagtggagatttggagcgctttgaggcctatggtagtaaagggaatagcttcatagaaaaactagacagatgcattctcaggaactttttggtgatgtttgtattcaactcccagagttgaactttcctttggaaagagcagctatgaaacactctttttctagaatctgcaagtggacgtttggagggctttgtggtttgtggtggaaaaggaaatatcttcacctaaatcctagagagaagcattctcagaagcttctctgtgatgactgcattcaactcacggagttgaacactccttttgagagcgcagttttgaaactctctttctgtggcatctgcaaggggacatgtagacctctttgaagatttcgatggaaacggaatcatcttcacataaaaactatacagaagcagtctcagaatcttctttgtgatgtttgcattcaaatcccagagttgaactttcctttcaaagttcacgtttgaaacactctttttgcaggatctacaagtggatatttggaccactctgtgtccttcgttcgaaacgggtatatcttcacaggacatctagacagaagctttctcagaaaattctttgggatgattgagtggaactcacagagctgaacattccttgcgatggagcagtttagaaacacactttctgcagaatctgcaagtgcatatttggacctctctgaggaattcgttggaaacgggataatttcagctgactaaacagaagcattctcagaacctccttcgtgatgtctgcattcaactcacagtgtggaacctttctttgatagttcaggtttgaaacactctttttgtagaaactgcaaggggataattgcacttctttgaggcctaccgtagtaaaggaaataacttcctatagaaagaagacagaagcattctcagaaccctcttcgtgatgtttgcattcaactcacagtgctgaacctttctttgatagttcagctttgaaacactcttcttgtagaaactgcaagtggatatttggtcctctctgaggatttcgttggaaacgggataaaccgcacagaactaaacagaagaattctcagagccctcttcgtgatgtttgcattcaactcacagtgctgaacctttctttgatagtgcagctttgaaacactctttttgtagaaactgcaagtggatgtttggtcctctctgaggatttcgttggaaacgggataaaccgcacagaactaaaacagaagcattgtcagaaacttctttgtgatgattgcattcaactcacagagttgaaggttccttttcaaacagcagtttccaatcactctttctgtggaatctgcaagtggatatttgggcctctctgaggatttcgttggaaacgggataaaacgcacagaactaaaacagaagcattctcagaaacttctctgtgatgtttgtgttcaactcccagagtttcacgttgcttttcatagagtagttctgaaacatgcttttcgtagtgtctgcaagtggacatttggagcgctttcaggcctgtggtggaaaacgaattatggtcacataaaaactggagagaagccttctcagaaacttctctgtgatgattgcattcaactcacagagttgaaccctcctatggatagagcagtgttgaaactctctttttgtggaatctgcaagtggatatgtggacctctccgaagatgtctttggaaacgggaatatcttcacataaaaactaaacagaagcattctcagaaacttcttggtgatgtttgcattcaaatcccagagttgaaccttcctttgatagttcaggtttgaaacactctttctgtaggatctgcaagtggctatttggaccactctgtggccttcgttcgaaacgggtatatcttcgcataaaatctagacagaagcattctcagaaaatactttgtgatgattgagttaaaatcacagagctgaacattcctttggatggagcaggtttgagacacactttttgtagaatctacaagtggatatttggacctctctgaggatttcgttggaaacgggataactgcacctaactaaacggaagcattctcagaaactgctttgtgatgattgcattcacctcacagagttgaacattcctattgatagagcagtttggaaacactcttgttgtggaatgtgcaagtggagatttggagcgctttgaggcctatggtagtaaagggaatagcttcatagaaaaactagacagatgcattctcaggaactttttggtgatgtttgtattcaactcccagagttgaactttcctttggaaagagcagctatgaaacactgtttttctagaatctgcaagtggacgtttggagggctttgtggtttgtggtggaaaaggaaatatcttcacctaaatactagatagaagcattctcagaagcttctctgtgatgactgcattcaactcacggagttgaacactccttttgagagcgcagttttgaaactctctttctgtggcatctgcaaggggacatgtagacctctttgaagatttcgttggaaacggaatcatcttcacataaaaactatacagaagcagtctcagaatcttctttgtgatgtttgcattcaaatccccgagttgaactttcctttcaaagttcacgtttgaaacactctttttgcaggatctacaagtggatatttggaccactctgtgtccttcgttcgaaacgggtatatcttcacatgacatctagacagaggctttctcagaaaattctttgggatgattgagttgaactcacagagctgagcattccttgcgatgtagcagtttagaaacacactttctgcagaatctgcaagtgcatatttggacctctgtgaggaattcgttggaaacgggataatttcagctgactaaacagaagcattctcagaaccttcttcgtgatgtctgcattcaactcacagtgtggaacctttctttgatagttcaggtttgaaacactctttttgtagaaactgcaaggggataattgcactctttgaggagtaccgtagtaaaggaaataacttcctctaaaaagaagacagaagcattctcagaaccctcttcgtgatgtttgcattcaactcacagtgctgaacctttctttgatagttcagctttgaaacactctttttgtagaaactgcaagtggatatttggtcctctctgaggatttcgttggaaacgggataaactgcacagaactaaacagaagcattctcagaaccttcttcgtgatgtttgcattcaactcacagtgtggaacctttctttgatagttcaggtttgaaacggtctttctgtagaaactgcaagtagatatttggacctctctgaggatttcgttggaaacgggataacccgcacagaactaaaacagaagcattcacagaaaactcttggtgacgactgagtttaactcacagagctgaacattcctttggatggagcagattcgaaacacactatttgtagaatgtgcaagtggatatttgggcctctctgaggatttcgttggaaacgggataaaccgcacagaactaaacagaagcattctcagaaactactttgtgatgattgcattcaagtcacagagttgaacattccctttgacagagcagtttggaaactctctttgtgtagaatctgcaagtggagatatggaccgctttgaggcctatggtagtaaaggaaatagcttcatataaaagctagacagtagcattctcagaaacttctttgtgatgcttgcattcaactcacagagttgaactttcctttcgagagagaagctttgaaacactttttttccagaatgtgcaagtggacatttgggtagctttgaggcctggggtggaaaaggaattatcttcccgtaaaagctagatagaagcattgtcagaaacttctttgtgatgattgcattcaactcacagagttgaaggttccttttcaaacagcagtttccaatcactctttctgtggaatctgcaagtggatatttcgacctctttgaagatttcgttggaaacgggagaatcttcacagaaaagctaaacagaagcattctcagaaacttctctgtgatgtttgtgttcaactcccagagtttcacgttgcttttcatagagtagttctgaaacatgcttttcgtagtgtctgcaagtggacatttggagcgctttcaggcctgtggtggaaaacgaattatggtcacataaaaactggagagaagccttctcagaaacttctctgtgatgattgcattcaactcacagagttgaaccctcctatggatagagcagtgttgaaactctctttttgtggaatctgcaagtggatatgtggacctctccgaagatgtctttggaaacgggaatatcttcacataaaaactaaacagaagcattctcagaaacttcttggtgatgtttgcattcaaatcccagagttgaaccttcctttgatagttcaggtttgaaacactctttctgtaggatctgcaagtggctatttggaccactctgtggccttcgttcgaaacgggtatatcttcgcataaaatctagacagaagcattctcagaaaatactttgtgatgattgagtttaaatcacagagctgaccattcctttggatggagcaggtttgagacacactttttgtagaatctacaagtggatatttggacctctctgaggatttcgttggaaacgggataactgcacctaactaaacggaagcattctcagaaactgctttgtgatgattgcattcacctcacagagttgaacattcctattgatagagcagtttggaaacactcttgttgtggaatgtgcaagtggagatttggagcgctttgaggcctatggtagtaaagggaatagcttcatagaaaaactagacagatgcattctcaggaactttttggtgatgtttgtattcaactcccagagttgaactttcctttggaaagagcagctatgaaacactctttttctagaatctgcaagtggacgtttggagggctttgtggtttgtggtggaaaaggaaatatcttcacctaaatactagatagaagcatcctcagaagcttctctgtgatgactgcattcaactcacggagttgaacactccttttgagagcgcagttttgaaactctctttctgtggcatctgcaaggggacatgtagacctccttgaagatttcgttggaaacggaatcatcttcacataaaaactatacagaagcagtctcagaatcttctttgtgatgtttgcattcaaatcccagagttgaactttcctttcaaagttcacgtttgaaacactctttttgcaggatctacaagtggatatttggaccactctgtgtccttcgttcgaaacgggtatatcttcacatgacatctagacagaagctttctcagaaaattctttgggatgattgagtggaactcacagagctgaacattccttgcgatgtagcagtttagaaacacactttctgcagaatctgcaagtgcatatttggacctctctgaggaattcgttggaaacgggataatttcagctgactaaacagaagcattctcagaaccttcttcgtgatgtttgcattcaactcacagtgttgaacctttctttgatagttcaggttggaaacggtctttctgtagaaactgcaagtagatatttggacctctctgaggatttcgttggaaacgggataaaccgcacagaactaaaacctaagaattctcagagccctcttcgtgatgtttgcattcaactcacagtgctgaacctttctttgatagtgcagctttgaaacactctttttgtagaaactgcaagtggatatttggtcctctctgaggatttcgttggaaacgggataaaccgcacagaactaaacagaagcattcacagaaaactcttggtgacgactgagtttaactcacagagctgaacattcctttggatggagcagtttcgaaacacactatttgtagaatctgcaagtggatatttgggcctctctgaggatttcgttggaaacgggataaaacgcacagaactaaaacagaagcattctcagaaactactttgtgatgattgcattcaagtcacagagttgaacattccctttgacagagcagtttggaaactctctttgtgtagaatctgcaagtggagatatggaccgctttgaggcctatggtagtaaaggaaataccttcatataaaagctagacagtagcattctcagaaacttctttgtgatgcttgcattcaactcacagagttgaactttcctttcgagagagaagctttgaaacactctttttccagaatgtgcaagtggacatttggggagctttgaggcctgtggtggaaaaggaattatcttcccgtaaaagctagatagaagcattgtcagaaacttctttgtgatgattgcattcaactcacagagttgaaggttccttttcaaacagcagtttccaatcactctttctgtggaatctgcaagtggatatttcgacctctttgaagatttcgttggaaacgggagaatcttcacagaaaagctaaacagaagcattctcagaaacttctctgtgatgtttgtgttcaactcccagagtttcacgttgcttttcatagagtagttctgaaacatgcttttcgtagtgtctgcaagtggacatttggagcactttcaggcctgtggtggaaaacgaattatggtcacataaaaactggagagaagccttctcagaaacttctctgtgatgattgcattcaactcacagagttgaaccctcctatggatagagcagtgttgaaactctctttttgtggaatctgcaagtggatatgtggacctctccgaagatgtctttggaaacgggaatatcttcacataaaaactaaacagaagcattctcagaaacttcttggtgatgtttgcattcaaatcccagagttgaaccttcctttgatagttcaggtttgaaacactctttttgtaggatctgcaagtggatatttggaccactctgtggccttcgttcgaaacgggtatatcttcgcataaaatctagacagaagcattctcagaaaatactttgtgatgattgagtttaactcacagagctgaacattcctttggatggagcaggtttgagacacaccttttgtagaatctacaagtggatatttggacctctctgaggatttcgttggaaacgggataactgcacctaactaaacggaagcattctcagaaactgctttgtgatgattgcattcacctcacagagttgaacattcctattgatagagcagtttggaaacactcttgttgtggaatgtgcaagtggagatttggagcgctttgaggcctatggtagtaaagggaatagcttcatagaaaaactagacagatgcattctcaggaaactttttggtgatgtttgtattcaactcccagagttgaactttcctttggaaagagcagctatgaaacactgtttttctagaatctgcaagtggacgtttggagggctttgtggtttgtggtggaaaaggaaatatcttcacctaaatactagatagaagcatcctcagaagcttctctgtgatgactgcattcaactcacggagttgaacactccttttgagagcgcagttttgaaactctctttctgtggcatctgcaaggggacatgtagacctctttgaagatttcgttggaaacggaatcatcttcacataaaaactacacagaagcagtctcagcaatcttctttgtgatgtttgcattcaaatccccgagttgaactttcctttcaaagttcacgtttgaaacactctttttgcaggatctacaagtggatatttggaccactctgtgtccttcgttcgaaacgggtatatcttcacatgacatctagacagaagctttctcagaaaattctttgggatgattgagttgaactcacagagctgagcattccttgcgatgtagcagtttagaaacacactttctgcagaatctgcaagtgcatatttgggacctctgtgaggaattcgttggaaacgggataatttcagctgactaaacagaagcattctcagaaccttcttcgtgatgtctgcattcaactcacagtgtggaacctttctttgatagttcaggtttgaaacactctttttgtagaaactgcaaggggataattgcacttctttgaggcctaccgtagtaaaggaaataacttcctatagaaagaagacagaagcattctcagaaccctcttcatgatgtttgcattcaactcacagtgctgaacctttctttgatagttcagctttgaaacactcttcttgtagaaactgcaagtggatatttggtcctctctgaggatttcgttggaaacgggataaaccgcacagaactaaacagaagcattctcagaaccttcttcgtgatgtttgcattcaactcacagtgttgaacctttctttgatagttcaggtttgaaacggtctttctgtagaaactgcaagtagatatttggacctctctgaggatttcgttggaaacgggataaaccgcacagaactaaaacagaagcattcacagaaaacccttggtgacgaatgagtttaactcacagtgctgaacattcctttggatggagcagtttcaaaacacactatttgtagaatctgcaagtggatatgtgggcctctctgaggatttcgttggaaacgggataaaccgcacagaactaaaacagaagcattctcagaaactactttgtgatgattgcattcaagtcacagagttgaacattccctatgacagagcagtttggaaactctctttgtgtagaatctgcaagtggagatatggaccgctttgaggcctatggtagtaaaggaaatagcttcatataaaagctagacagtagcattctcagaaacttctttgtgatgcttgcattcaactcacagagttgaactttcctttcgagagagaagctttgaaacactctttttccagaatgtgcaagtggacatttggagggctttgaggcctgtggtggaaaaggaattatcttcccgtaaaagctagatagaagcattgtcagaaacttctttgtgatgattgcattcaagtcacagagttgaaggttccttttcaaagagcagtttccaatcactctttctgtggaatctgcaagtggatatttggacctctttgaagatttcgttggaaacgggagaatcttcacagaaaagctaaacagaagcattctcagaaacttctctgtgatgtttgtgttcaactcccagagtttcacattgcttctcatagagtagttctgaaacatgcttttcgtagtgtctgcaagtggacatttggagcgctttcaggcctgtggtggaaaacgaattatggtcacataaaaactggagagaagccttctcagaaacttctctgtgatgattgcattcaactcacagagttgaaccctcctatggatagagcattgttgaaactctctttttgtggaatctgcaagtggatatgtggacctctccgaagatgtctttggcaacgggaatatcttcacataaaaactaaacagaagcattctcagaaacttcttggtgatgtttgcattcaaatcccagagttgaaccttcctgtgatagttcaggtttgaaacactctttttgtaggatctgcaagtggatatttggaccactctgtggccttcgttcgaaacgggtacatcttcacataaaatctagacagaagcattctcagaaaatactttgtgatgattgagtttaactcacggagctgaacattcctttggatggagcaggtttgagacacactttttgtagaatctacaagtggatattgggacctctctgaggatttcgttggaaacgcgataactgcacctaactaaacggaagcattctcagaaactgctttgtgatgattgcattcacctcacagagttgaacattcctattgatagagcagtttggaaacactcttgttgtggaatgtgcaagtggagatttggagcgctttgaggcctatggtagtaaagggaatagcttcatagaaaaacaagacagatgcattctcaggaactttttggtgatgtttgtattcaactcccagagttgaactttcctttggaaagagcagctatgaaacactgtttttctagaatctgcaagtggacgtttggagggctttgtggtttgtggtggaaaaggaaatatcttcacctaaatactagatagaagcattctcagaagcttctctgtgatgactgcattcaactcacggagttgaacactccttttgagagcgcagttttgaaactctctttctgtggcatctgcaaggggacatgtagacctctttgaagatttcgttggaaacggaatcatcttcacataaaaactatacagaagcagtctcagaatcttctttgtgatgtttgcattcaaatcccagagttgaactttcctttcaaagttcacgtttgaaacactctttttgcaggatctacaagtgtatatttggaccactctgtgtccttcgttcgaaacgggtatatcttcacatgacatctagacagaagctttctcagaaaattctttgggttgattgagttgaactcacagagctgaacattccttgcgatgtagcagtttagaaacacactttctgcagaatctgcaagtgcatatttggacctctctgaggaattcgttggaaacgggataatttcagctgactaaacagaagcattctcagaaccttcttcgtgatgtctgcattcaactcacagtgtggaacctttctttgatagttcaggtttgaaacactctttttgtagaaactgcaaggggataattgcacttctttgaggcctaccgtagtaaaggaaataacttcctatagaaagaagacagaagcattctcagaaccctcttcgtgatgtttgcattcaactcacagtgctgaacctttctttgatagttcagctttgaaacactcttcttgtagaaactgcaagtggatatttggtcctctctgaggatttcgttggaaacgggataaaccgcacagaactaaacagaagcattctcagaaccttcttcgtgatgtttgcattcaactcacagtgttgaacctttctttgatagttcaggtttgaaacggtctttctgtagaaactgcaagtagatatttggacctctctgaggatttcgttggaaacgggataacccgcacagaactaaaacagaagcattcacagaaaactcttggtgacgactgagtttaactcacagagctgaacattcctttggatggagcagtttcgaaacacacgatttgtagaatgtgcaagtggatatgtgggcctctctgaggatttcgttggaaacgggataaaccgcacagaactaaacagaagcattctcagaaactactttgtgatgattgcattcaagtcacagagttgaacattccctttgacagagcagtttggaaactctctttgtgtagaatctgcaagtggagatatggaccgctttgaggcctatggtagtaaaggaaatagcttcatataaaagctagacagtagcattctcagaaacttctttgtgatgcttgcattcaactcacagagttgaactttcctttcgagagagaagctttgaaacactctttttccagaatgtgcaagtggacatttggggagctttgaggcctgtggtggaaaaggaattatcttcccgtaaaagctagatagaagcattgtcagaaacttctttgagatgattgcattcaactcacagagttgaaggttccttttcaaacagcagtttccaatcactctttctgtggaatctgcaagtggatatttcgacctctttgaagatttcgttggaaacgggagaatcttcacagaaaagctaaacagaagcattctcagaaacttctctgtgatgtttgtgttcaactcccagagtttcacgttgcttttcatagagtagttctgaaacatgcttttcgtagtgtctgcaagtggacatttggagcgctttcaggcctgtggtggaaaacgaattatggtcacataaaaactggagagaagccttctcaggaaacttctctgtgatgattgcattcaactcacagagttgaaccctcctatggatagagcagtgttgaaactctctttttgtggaatctgcaagtggatatgtggacctctccgaagatgtctttggaaacgggaatatcttcacataaaaactaaacagaagcattctcagaaacttcttggtgatgtttgcattcaaatcccagagttgaaccttcctttgatagttcaggtttgaaacactctttctgtaggatctgcaagtggctatttggaccactctgtggccttcgttcgaaacgggtatatcttcgcataaaatctagacagaaagcattctcagaaaatactttgtgatgattgagtttaaatcacagagctgaccattcctttggatggagcaggtttgagacacactttttgtagaatctacaagtggatatttggacctctctgaggatttcgttggaaacgggataactgcacctaactaaacggagcattctcagaaactgctttgtgatgattgcattcacctcacagagttgaacattcctattgatagagcagtttggaaacactcttgttgtggaatgtgcaagtggagatttggagcgctttgaggcctgtggtagtaaagggaatagcttcatagaaaaactagacagatgcattctcaggaaccttttggtgatgtttgtattcaactcccagagttgaactttcctttggaaagagcagctatgaaacactctttttctagaatctgcaagtggacgtttggagggctttgtggtttgtggtggaaaaggaaatatcttcacctaaatactagatagaagcattctcagaagcttctctgtgatgactgcattcaactcacggagttgaacactccttttgagagcgcagttttgaaactctctttctgtggcatctgcaaggggacatgtagacctctttgaagatttcgttggaaacggaatcatcttcacataaaaactatacagaagcagtctcagaatcttctttgtgatgtttgcattcaaatcccagagttgaactttcctttcaaagttcacgtttgaaacactctttttgcaggatctacaagtggatatttggaccactctgtgtccttcgttcgaaacgggtatatcttcacacgacatctagacagaagctttctcagaaaattctttgggatgattgagtggaactcacagagctgaacattccttgcgatgtagcagtttagaaacacactttctgcagaatctgcaagtgcatatttggacctctctgaggaattcgttggaaacgggataatttcagctgactaaacagaagcattctcagaaccttcttcgtgatgtctgcattcaactcacagtgtggaacctttctttgatagttcaggtttgaaacactctttttgtagaaactgcaaggggataattgcacttctttgaggcctaccgtagtaaaggaaataacttcctatagaaagaagacagaagcattctcagaaccctcttcgtgatgtttgcattcaactcacagtgctgaacctttctttgatagttcagctttgaaacactcttcttgtagaaactgcaagtggatatttggtcctctctgaggatttcgttggaaacgggataaaccgcacagaactaaacagaagaattctcagagccctcttcgtgatgtttgcattcaactcacagtgctgaacctttctttgatagtgcagctttgaaacactctttttgtagaaactgcaagtggatgtttggtcctctctgaggatttcgttggaaacgggataaaccgcacagaactaaaacagaagcattgtcagaaacttctttgtgatgattgcattcaactcacagagttgaaggttccttttcaaacagcagtttccaatcactctttctgtggaatctgcaagtggatatttgggcctctctgaggatttcgttggaaacgggataaaacgcacagaactaaaacagaagcattctcagaaacttctctgtgatgtttgtgttcaactcccagagtttcacgttgcttttcatagagtagttctgaaacatgcttttcgtagtgtctgcaagtggacatttggagcgctttcaggcctgtggtggaaaacgaattatggtcacataaaaactggagagaagccttctcagaaacttctctgtgatgattgcattcaactcacagagttgaaccctcctatggatagagcagtgttgaaactctctttttgtggaatctgcaagtggatatgtggacctctccgaggatgtctttggaaacgggaatatcttcacataaaaactaaacagaagcattctcagaaacttcttggtgatgtttgcattcaaatcccagagttgaaccttcctttgatagttcaggtttgaaatactctttttgtaggatctgcaagtggatatttggaccactctgtggccttcgttcgaaacgggtacatcttcgcataaaatctagacagaagcattctcagaaaatactttgtgatgattgagttgaactcacagagctgaacattcctttggatggagcaggtttgagacacactttttgtagaatctacaagtggatatttggacctctctgaggatttcgttggaaacgggataactgcacctaactaaacggaagcattctcagaaactgctttgtgatgattgcattcacctcacagagttgaacattcctattgatagagcagtttggaaacactcttgttgtggaatgtgcaagtggagatttggagcgctttgaggcctatggtagtaaagggaatagcttcatagaaaaactagacagatgcattctcaggaactttttggtgatgtttgtattcaactcccagagttgaactttcctttggaaagagcagctatgaaacactctttttctagaatctgcaagtggacgtttggagggctttgtggtttgtggtggaaaaggaaatatcttcacctaaatactagatagaagcattctcagaagcttctctgtgatgactgcattcaactcacggagttgaacactccttttgagagcgcagttttgaaactctctttctgtggcatctgcaaggggacatgtagacctctttgaagatttcgttggaaacggaatcatcttcacataaaaactatacagaagcagtctcagaatcttctttgtgatgtttgcattcaaatcccagagttgaactttcctttcaaagttcacgtttgaaacactctttttgcaggatctacaagtggatatttggaccactctgtgtccttcgttcgaaacgggtatatcttcacacgacatctagacagaagctttctcagaaaattctttgggatgattgagtggaactcacagagctgaacattccttgcgatggagcagtttagaaacacactttctgcagaatctgcaagtgcatatttggacctctctgaggaattcgttggaaacgggataatttcagctgactaaacagaagcattctcagaaccttcttcgtgatgtctgcattcaactcacagtgtggaacctttctttgatagttcaggtttgaaacactctttttgtagaaactgcaaggggataattgcacttctttgaggcctaccgtagtaaaggaaataacttcctatagaaagaagacagaagcattctcagaaccctcttcgtgatgtttgcattcaactcacagtgctgaacctttctttgatagtgcagctttgaaacactctttttgtagaaactgcaagtggatatttggtcctctctgaggatttcgttggaaacgggataaaccgcacagaactaaaacagaagcattctcagagccctcttcgtgatgtttgccttcaactcacagtgctgaacctttctttgatagtgcagctttgaaacactctttttgtagaaactgcaagtggatatttggtcctctctgaggatttcgttggaaacgggataaaccgcacagaactaaaacagaagcattctcagaaccttcttcgtgatgtttgcattcaactcacagtgttgaacctttctttgatagttcaggtttgaaacggtctttctgtagaaactgcaagtagatatttggacctctctgaggatttcgttggaaacgggataacccgcacagaactaaaacagaagcattcacagaaaactcttggtgacgactgagtttaactcacagagctgaacattcctttggatggagcagtttcgaaacacactatttgtagaatgtgcaagtggatatttgggcctctctgaggatttcgttggaaacgggataaaccgcacagaactaaacagaagcattctcagaaactactttgtgatgattgcattcaagtcacagagttgaacattccctttgacagagcagtttggaaactctctttgtgtagaatctgcaagtggagatatggaccgctttgaggcctatggtagtaaaggaaatagcttcatataaaagctagacagtagcattctgagaaacttctttgtgatgcttgcattcaactcacagagttgaactttcctttcgagagagaagctttgaaacactctttttccagaatctgcaagtggacatttggagggctttgaggcctgtggtggaaaaggaattatcttcccataaaagctagatagaagcattgtcagaaacttctttgtgatgattgcattcaagtcacagagttgaaggttccttttcaaagagcagtttccaatcactctttctgtggaatctgcaagtggatatttggacctctttgaagatttcgttggaaacgggagaatcttcacagaaaagctaaacagaaacattctcagaaacttctctgtgatgtttgtgttcaactcccagagtttcacattgcttctcatagagtagttctgaaacatgcttttcgtagtgtctgcaagtggacatttggagcgctttcaggcctgtggtggaaaacgaattatggtcacataaaaactggagagaagcattctcagaaacttcttggtgatgtttgcattcaaatcccagagttgaaccttcctttgatagttcaggtttgaaacactctttttgtaggatctgcaagtggctatttggaccactctgtggccttcgttcgaaacgggtatatacttcgcataaaatctagacagaagcattctcagaaaatactttgtgatgattgagtttaaatcacagagctgaccattcctttggatggagcaggtttgagacacactttttgtagaatctacaagtggatatttggacctctctgaggatttcgttggaaacgggataactgcacctaactaaacggaaagcattctcagaaactgctttgtgatgattgcattcacctcacaggagttgaacattcctattgatagagcagtttggaaacactcttgttgtggaatgtgcaagtggagatttggagcgctttgaggcctgtggtagtaaagggaatagcttcatagaaaaactagacagatgcattctcaggaacttttttgtgatgtttgtattcaactcccagagttgaactttcctttggaaagagcagctatgaaacactctttttctagaatctgcaagtggacgtttggagggctttgtggtttgtggtggaaaaggaaatatcttcacctaaatactagatagaagcattctcagaagcttctctgtgatgactgcattcaactcacggagttgaacactccttttgagagcgcagttttgaaactctctttctgtggcatctgcaaggggacatgtagacctctttgaagatttcgttggaaacggaatcatcttcacatcaaaactatacagaagcagtctcagaatcttctttgtgatgtttgcattcaaatcccagagttgaactttcctttcaaagttcacgtttgaaacactctttttgcaggatctacaagtggatatttggaccactctgtgtccttcgttcgaaacgggtatatcttcacatgacatctagacagaagctttctcagaaaattctttgggatgattgagtggaactcacagagctgaacattccttgcgatgtagcagtttagaaacacactttctgcagaatctgcaagtgcatatttggacctctctgaggaattcgtcggaaatgggataatttcagctgactaaacagaagcattctcagaaccttcttcgtgatgtctgcattcaactcacagtgtggaacctttctttgatagttcaggtttgagacactctttttgtagaaactgcaaggggataattgcacttctatgaggcctaccgtagtaaaggaaataacttcctatagaaagaagacagaagcattctcagaaccctcttcgtgatgtttgcattcaactcacagtgctgaacctttctttgatagttcagctttgaaacactcttcttgtagaaactgcaagtggatatttggtcctctctgaggatttcgttggaaacgggataaaccgcacagaactaaacagaagaattctcagagccctcttcgtgatgtttgcattcaactcacagtgctgaacctttctttgatagtgcagctttgaaacactctttttgtagaaactgcaagtggatgtttggtcctctctgaggatttcgttggaaacgggataaaccgcacagaactaaaacagaagcattcacagaaaactcttggtgacgactgagtttaactcacagagctgaacattcctttggatggagcagtttcgaaacacactatttgtagaatctgaaagtggatatttgggcctctctgaggatttcgttggaaacgggataaaacgcacagaactaaaacagaagcattctcagaaactactttgtgattattgcattcaagtcacagagttgaacattccctttgacagagcagtttggaaactctctttgtgtagaatctgcaagtggagatatggaccgctttgaggcctatggtagtaaaggaaatagcttcatataaaagctagacagtagcattctcagaaacttctttgtgatgcttgcattcaactcacagagttgaactttcctttcgagagagaagctttgaaacactctttttccagaatgtgcaagtggacatttggggagctttgaggcctgtggaggaaaaggaattatcttcccgtaaaagctagatagaagcattgtcagaaacttctttgtgatgattgcattcaactcacagagttgaaggttccttttcaaacagcagtttccaatcactctttctgtggaatctgcaagtggatatttcgacctctttgaagatttcgttggaaacgggagaatcttcacagaaaagctaaacagaagcattctcagaaacttctctgtgatgtttgtgttcaactcccagagtttcacattgcttttcatagagtagttctgaaacatgcttttcgtagtgtctgcaagtggacatttggagcgctttcaggcctgtggtggaaaacgaattatggtcacagaaaaactggagagaagccttctcagaaacttctctgtgatgattgcattcaactcacagagttgaaccctcctatggatagagcagtgttgaaactctgttttgtggaatctgcaagtggatatgtggacctctccgaagatgtctttggaaacgggaatatcttcacataaaaactaaacagcagcattctcagaaacttcttggtgatgtttacattcaaatcccagagttgaagcttcctttgatagttcaggtttgaaacactctttttgtaggatctgcaagtggatatttggaccactctgtggccttcgttcgaaacgggtacatcttcgcataaaatctagacagaagcattctcagaaaatactttgtgatgattgagtttaactcacagagctgaacattcctttggatggagcaggtttgagacacactttttgtagaatctacaagtggatatttggacctctctgaggatttcgttggaaacgggataactgcacctaactaaacggaagcattctcagaaactgctttgtgatgattgcattcacctcacagagttgaacattcctattgatagagcagtttggaaacactcttgttgtggaatgtgtaagtggagatttggagcgctttgaggcctatggtagtaaagggaatagcttcatagaaaaactagacagatgcattctcaggaactttttggtgatgtttgtattcaactcccagagttgaactttcctttggaaagagcagctatgaaacactctttttctagaatctgcaagtggacgtttggagggctttgtggtttgtggtggaaaaggaaatatcttcacctaaatactagatagaagcattctcagaagcttctctgtgatgactgcattcaactcacggagttgaacactccttttgagagcgcagttttggaactctctttctgtggcatctgcaaggggacatgtagacctctttgaagatttcgttggaaacggaatcatcttcacataaaaactatacagaagcagtctcagaatcttctttgtgatgtttgcattcaaatccctgagttgaactttcctttccaagttcacgtttgaaacactctttttgcaggatctacaagtggatatttggaccactctgtgtccttcgttcgaaacgggtatatcttcacatgacatctagacagaagctttctcagaaaattctttgggatgattgagtggaactcacagagctgaacattccttgcgatgtagcagtttagaaacacactttctgcagaatctgcaagtgcatatttggacctctctgaggaattcgttggaaacgggataatttcagctgactaaacagaagcattctcagaaccctcttcgtgatgtttgcattcaactcacagtgctgaaccttcctttgatagttcaggtttgaaacactctttttgtagaaactgcaaggggataattgcacttctttgaggcctaccgtagtaaaggaaataacttcctatagaaagaagacagaagaattctcagagccctcttcgtgatgtttgcattcaactcacagtgctgaacctttctttgatagtgcagctttgaaacactctttttgtagaaactgcaagtggatgtttggtcctctctgaggatttcgttggaaacgggataaaccgcacagaactaaaacagaagcattgtcagaaacttctttgtgatgattgcattcaactcacagagttgaaggttccttttcaaacagcagtttccaatcactctttctgtggaatctgcaagtggatatttgggcctctctgaggatttcgttggaaacgggataaaacgcacagaaataaaacagaagcattctcagaaacttctctgtgatgtttgtgttcaactcccagagtttcacgttgcttttcatagagtagttctgaagcatgcttttcgtagtgtctgcaagtggacatttggagcgctttcaggcctgtggtggaaaacgaattatggtcacataaaaactggagagaagccttctcagaaacttctctgtgatgattgcattcaactcacagagttgaaccctcctatggatagagcagtgttgaaactctctttttgtggaatctgcaagtggatatgtggacctctccgaagatgtctttggaaacgggaatatcttcacataaaaactaaacagaagcattctcagaaacttcttggtgatgtttgcattcaaatcccagagttgaaccttcctttgaaagttcaggtttgaaacactctttttgtaggatctgcaagtggctatttggacaactctgtggccttcgttcgaaacgggtatatcttcgcataaaatctagacagaagcattctcagaaaatactttgtgatgattgagtttaactcacagagctgaacattcctttggatggagcaggtttgagacacactttttgtagaatctacaagtggatatttggacctctctgaggatttcgttggaaacgggataactgcacctaactaaacggaagcattctcagcaaactgctttgtgatgattgcattcacctcacagagttgaacattcctattgatagagcagtttggaaacactcttgttgtggaatgtgcaagtggagatttggagcgctttgaggcctatggtagtaaagggaatagcttcatagaaaaactagacagatgcattctcaggaactttttggtgatgtttgtattcaactcccagagttgaactttcctttggaaagagcagctatgaaacactctttttctagaatctgcaagtggacgtttggagggctttgtggtttgtggtggaaaaggaaatatcttcacctaaatactagatagaaagcattctcagaagcttctctgtgatgactgcattcaactcacggagttgaacactccttttgagagcgcagttttgaaactctctttctgtggcatctgcaaggggacatgtagacctctttgaagatttcgttggaaacggaatcatcttcacataaaaactatacagagcagtctcagaatcttctttgtgatgtttgcattcaaatcccagagttgaactttcctttcaaagttcacgtttgaaacactctttttgcaggatctacaagtggatatttggaccactctgtgtccttcgttcgaaacgggtatatcttcacacgacatctagacagaagctttctcagaaaattctttgggatgattgagtggaactcacagagctgaacattccttgcgatgtagcagtttagaaacacactttctgcagaatctgcaagtgcatatttggacctctctgaggaattcgttggaaacgggataatttcagctgactaaacagaagcattctcagaaccttcttcgtgctgtctgcattcaactcacagtgtggaacctttctttgatagttcaggtttgaaacactctttttgtagaaactgcaaggggataattgcacttctttgaggcctaccgtagtaaaggaaataacttcctatagaaagaagacagaagcattctcagaaccctcttcgtgatgtttgcattcaactcacagtgctgaacctttctttgatagttcagctttgaaacactcttcttgtagaaactgcaagtggatatttggtcctctctgaggatttcgttggaaacgggataaaccgcacagaactaaacagaagaattctcagagccctcttcgtgatgtttgcattcaactcacagtgctgaacctttctttgatagtgcagctttgaaacactctttttgtagaaactgcaagtggatgtttggtcctctctgaggatttcgttggaaacgggataaaccgcacagaactaaaacagaagcattgtcagaaacttctttgtgatgattgcattcaactcacagagttgaaggttccttttcaaacagcagtttccaatcactctttctgtggaatctgcaagtggatatttgggcctctctgaggatttcgttggaaacgggataaaacgcacagaactaaaacagaagcattctcagaaacttctctgtgatgtttgtgttcaactcccagagtttcacgttgcttttcatagagtagttctgaaacatgcttttcgtagtgtctgcaagtggacatttggagcgctttcaggcctgtggtggaaaacgaattatggtcacataaaaactggagagaagccttctcagaaacttctctgtgatgattgcattcaactcacagagttgaaccctcctatggatagagcagtgttgaaactctctttttgtggaatctgcaagtggatatgtggacctctccgaagatgtctttggaaacgggaatatcttcacataaaaactaaacagaagcattctcagaaacttcttggtgatgtttgcattcaaatcccagagttgaaccttcctttgatagttcaggtttgaaacactctttctgtaggatctgcaagtggctatttggaccactctgtggccttcgttcgaaacgggtatatcttcgcataaaatctagacagaagcattctcagaaaatactttgtgatgattgagtttaaatcacagagctgaccattcctttggatggagcaggtttgagacacactttttgtagaatctacaagtggatatttggacctctctgaggatttcgttggaaacgggataactgcacctaactaaacggaagcattctcagaaactgctttgtgatgattgcattcacctcacagagttgaacattcctattgatagagcagtttggaaacactcttgttgcggaatgtgcaagtggagatttggagcgctttgaggcctgtggtagtaaagggaatagcttcatagaaaaactagacagatgcattctcaggaactttttggtgatgtttgtattcaactcccagagttgaactttcctttggaaagagcagctatgaaacactctttttctagaatctgcaagtggacgtttggagggctttgtggtttgtggtggaaaaggaaatatcttcacctaaatactagatagaagcatcctcagaagcttctctgtgatgactgcattcaactcacggagttgaacactccttttgagagcgcagttttgaaactctctttctgtggcatctgcaaggggacatgtagacctctttgaagatttcgttggaaacggaatcatcttcacataaaaactacacagaagcagtctcagaatcttctttgtgatgtttgcattcaaatccccgagttgaactttcctttcaaagttcacgtttgaaacactctttttgcaggatctacaagtggatatttggaccactctgtgtccttcgttcgaaacgggtatatcttcacatgacatctagacagaagctttctcagaaaattctttgggatgattgagttgaactcacagagctgagcattccttgcgatgtagcagtttagaaacacactttctgcagaatctgcaagtgcatatttggacctctgtgaggaattcgttggaaacgggataatttcagctgactaaacagaagcattctcagaaccttcttcgtgatgtctgcattcaactcacagtgtggaacctttctttgatagttcaggtttgaaacactctttctgtagaaactgcaaggggataattgcactctttgaggagtaccgtagtaaaggaaataacttcctataaaaagaagacagaagcattctcagaaccctcttcgtgatgtttgcattcaactcacagtgctgaacctttctttgatagttcagctttgaaacactctttttgtagaaactgcaagtggatatttggtcctctctgagcatttcgttggaaacgggataaactgcacagaactaaacagaagcattctcagaaccttcttcgtgatgtttgcattcaactcacagtgttgaacctttctttgatagttcaggtttgaaacggtctttctgtagaaactgcaagtagatatttggacctctctgaggatttcgttggaaacgggataacccgcacagaactaaaacagaagcattcacagaaaactcttggtgacgactgagtttaactcacagagctgaacattcctttggatggagcagtttcgaaacacactatttgtagaatgtgcaagtggatatttaggcctctctgaggatttcgttggaaacggggtaaaccgcacagaactaaacagaagcattctcagaaactactttgtgatgattgcattcaagtcacagagctgaacattccctttgacagagcagtttggaaactctctttctgtagaatctgcaagtggagatatggaatgctttgaggactatggtagtaaaggaaatagcttcatagaaaagctagacagtagcattctcagaaacttctttgtgatgcttgcattcaactcacagagttgaactttcctttcgagagagaagctttgaaacactctttttccagaatctgcaagtggacatttggagggctttgaggcctgtggtggaaaaggaattatcttcccgtaaaagctggatagaagcattgtcagaaacttctttgagatgattgcattcaactcacagagttgaaggttccttttcaaacagcagtttccaaacactatttctgtggaatctgcaagtggatatttggacctctttgaagatttcgttggaaacgggataaccttcacagaaaagctaaacagaagcattctcagaaacttctctgtgatgtttgtgttcaactcccagagtttcacgttgcttttcatagagtagttctgaaacatgcttttcgtagtgtctgcaagtggacatttggagcgctttcaggcctgtggtggaaaacgaattatggtcacataaaaactggagagaagccttctcagaaacttctctgtgatgattgcattcaactcacagagttgaaccctcctatggatagagcagtgttgaaactctgtttttgtggaatctgcaagtggatatgtggacctctccgaagatgtctttggaaacgggaatatcttcacataaaaactaaacagaagcattctcagaaacttcttggtgatgtttgcattcaaatcccagagttgaaccttcctttgatagttcaggtttgaaacactctttttgtaggatctgcaagtggatatttggaccacactgtggccttcgttcaaaacgggtacatcttcgcataatatgtagacagaagcattctcagaaaatactttgtgatgattgagttgaactcacagagctgaacattcctttggatggagcaggtttgagacacactttttgtagaatctacaagtggatatttggacctctctgaggatttcgttggaaacgggataactgcacctaactaaacggaagcattcccagaaactgctttgtgatgattgcattcacctcacagagttgaacattcctattgatagagcagtttggaaacactcttgttgttgaatgtgcaagtggagatttggagcgctttgaggcctatggtcgtaaagggaatagcttcatagaaaaactagacagatgcattctcaggaactttttggtgatgtttgtattcaactcccagagttgaactttcctttggaaagagcagctatgaaacactctttttctagaatctgcaagtggacgtttggagggctttgtggtttgtggtggaaaaggaaatatcttcacctaaatactagatagaagcattctcagaagcttctctgtgatgactgcattcaactcacggagttgaacactccttttgagagcgcagttttgaaactctctttctgtggcatctgcaaggggacatgtagacctctttgaagatttcgttggaaacggaatcatcttcacataaaaactatacagaagcagtctcagaatcttctttgtgatgtttgcattcaaatcccagagttgaactttcctttcaaagttcacgtttgaagcactctttttgcaggatctacaagtggatatttggaccactctgtgtccttcgttcgaaacgggtatatcttcacatgacatctagacagaagctttctcagaaaattctttgggatgattgagtggaactcacagagctgaacattccttgcgatgtagcagtttagaaacacactttctgcagaatctgcaagtgcatatttggacctctctgaggaattcgttggaaacgggataatttcagctgactaaacagaagcattctcagacacccttcttcgtgatgtctgcattcaactcacagtgtggaacctttctttgatagttcaggtttgaaacactctttttgtagaaactgcaaggggataattgcacttctttgaggcctaccgtagtaaaggaaataacttcctatagaaagaagacagaagcattctcagaaccctcttcgtgatgtttgcattcaactcacagtgctgaacctttctttgatagttcagctttgaaacactcttcttgtagaaactgcaagtggatatttggtcctctctgaggatttcgttggaaacgggataaaccgcacagaactaaacagaagaattctcagagccctcttcgtggtgtttgcattcaactcacagtgctgaacctttctttgatagtgcagctttgaaacactctttttgtagaaactgcaagtggatatttggtcctctctgaggatttcgttggaaacgggataaaccgcacagaactaaaacagaagcattcacagaaaactcttggtgacgactgagtttaactcacagagctgaacattcctttggatggagcagtttcgaaacacactatttgtagaatctgcaagtggatatttgggcctctctgaggatttcgttggaaacgggataaaacgcacagaactaaaacagaagcattctcagaaactactttgtgatgattgcattcaagtcacagagttgaacattccctttgacagagcagtttggaaactctctttgtgtagaatctgcaagtggagatatggaccgctttgaggcctatggtagtaaaggaaatagcttcatataaaagcgagacagtagcattctcagaaacttctttgtgatgcttgcattcaactcacagagttgaactttcctttcgagagagaagctttgaaacactctttttccagaatgtgcaagtggacatttggggagctttgaggcctgtggtggaaaaggaattatcttcccgtaaaagctagatagaagcattgtcagaaacttctttgtgatgattgcattcaactcacagagttgaaggttccttttcaaacagcagtttccaatcactctttctgtggaatctgcaagtggatatttcgacctctttgaagatttcgttggaaacgggagaatcttcacagaaaagctaaacagaagcattctcagaaacttctctgtgatgtttgtgttcaactcccagagtttcacgttgcttttcatagagtagttctgaaacatgcttttcgtagtgtctgcaagtggacatttggagcgctttcaggcctgtggtggaaaacgaattatggtcacataaaaactggagagaagccttctcagaaacttctctgtgatgattgcattcaactcacagagttgaaccctcctatggatagagcagtgttcaaactctctttttgtggaatctgcaagtggatatgtggacctctccgaagatgtctttggaaacgggaatatcttcacataaaaactaaacagaagcattctcagaaacttcttggtgatgtttgcattcaaatcccagagttgaaccttcctttgatagttcaggtttgaaacactctttttgtaggatctgcaagtggctatttggaccactctgtggccttcgttcgaaacgggtatatcttcgcataaaatctagacagaagcattctcagaaaatactttgtgatgattgagtttaactcacagagctgaacattcctttggatggagcaggtttgagacacactttttgtagaatctacaagtggatatttggacctctctgaggatttcgttggaaacgggataactgcacctaactaaacggaagcattctcagaaactgctttgtgatgattgcattcacctcacagagttgaacattcctattgatagagcagtttggaaacactcttgttgtggaatgtgcaagtggagatttggagcgctttgaggcctatggtagtaaagggaatagcttcatagaaaaactagacagatgcattctcaggaactttttggtgatgtttgtattcaactcccagagttgaactttcctttggaaagagcagctatgaaacactctttttctagaatctgcaagtggacgtttggagggctttgtggtttgtggtggaaaaggaaatatcttcacctaaatactagatagaagcattctcagaagcttctctgtgatgactgcattcaactcacggagttgaacactccttttgagagcgcagttttgaaactctctttctgtggcatctgcaaggggacatgtagacctctttgaagatttcgttggaaacggaatcatcttcacataaaaactatacagaagcagtctcagaatcttctttgtgatgtttgcattcaaatcccagagttgaactttcctttcaaagttcacgtttgaaacactctttttgcaggatctacaagtggatatttggaccactctgtgtccttcgttcgaaacgggtatatcttcacacgacatctagacagaagctttctcagaaaattctttgggatgattgagtggaactcacagagctgaacattccttgcgatgtagcagtttagaaacacactttctgcagaatctgcaagtgcatatttggacctctctgaggaattcgttggaaacgggataatttcagctgactaaacagaagcattctcagaaccttcttcgtgatgtctgcattcaactcacagtgtggaacctttctttgatagttcaggtttgaaacactctttttgtagaaactgcaaggggataattgcacttctttgaggcctaccgtagtaaaggaaataacttcctatagaaagaagacagaagcattctcagaaccctcttcgtgatgtttgcattcaactcacagtgctgaacctttctttgatagttcagctttgaaacactcttcttgtagaaactgcaagtggatatttggtcctctctgaggatttcgttggaaacgggataaaccgcacagaactaaacagaagaattctcagagccctcttcgtgatgtttgcattcaactcacagtgctgaacctttctttgatagtgcagctttgaaacactctttttgtagaaactgcaagtggatatttggtcctctctgaggatttcgttggaaacgggataaaccgcacagaactaaaacagaagcattcacagaaaactcttggtgacgactgagtttaactcacagagctgaacattcctttggatggagcagtttcgaaacacactatttgtagaatctgcaagtggatatttgggcctctctgaggatttcgttggaaacgggataaaacgcacagaactaaaacagaagcattctcagaaactactttgtgattattgcattcaagtcacagagttgaacattccctttgacagagcagtttggaaactctctttgtgtagaatctgcaagtggagatatggaccgctttgaggcctatggtagtaaaggaaatagcttcatataaaagctagacagtagcattctcagaaacttctttgtgatgcttgcattcaactcacagagttgaactttcctttcgagagagaagctttgaaacactctttttccagaatgtgcaagtggacatttggggagctttgaggcctgtggaggaaaaggaattatcttcccgtaaaagctagatagaagcattgtcagaaacttctttgtgatgattgcattcaactcacagagttgaaggttccttttcaaacagcagtttccaatcactctttctgtggaatctgcaagtggatatttgggcctctctgaggatttcgttggaaacgggataaaacgcacagaactaaaacagaaagcattctcagaaacttctctgtgatgtttgtgttcaactcccagagtttcacgttgcttttcatagagtagttctgaaacatgcttttcgtagtgtctgcaagtggacatttggagcgctttcaggcctgtggtggaaaacgaattatggtcacataaaaactggagagaagccttctcagaaacttctctgtgatgattgcattcaactcacagagttgaaccctcctatggatagagcagtgttgaaactctctttttgtggaatctgcaagtggatatgtggacctctccgaagatgtctttggaaacgggaatatcttcacataaaaactaaacagaagcattctcagaaacttcttggtgatgtttgcattcaaatcccagagttgaaccttcctttgatagttcaggtttgaaacactctttctgtaggatctgcaagtggctatttggaccactctgtggccttcgttcgaaacgggtatatcttcgcataaaatctagacagaagcattctcagaaaatactttgtgatgattgagtttaaatcacagagctgaccattcctttggatggagcaggtttgagacacactttttgtagaatctacaagtggatatttggacctctctgaggatttcgttggaaacgggataactgcacctaactaaacggaagcattctcagaaactgctttgtgatgattgcattcacctcacagagttgaacattcctattgatagagcagtttggaaacactcttgttgtggaatgtgcaagtggagatttggagcgctttgaggcctgtggtagtaaagggaatagcttcatagaaaaactagacagatgcattctcaggaactttttggtgatgtttgtattcaactcccagagttgaactttcctttggaaagagcagctatgaaacactctttttctagaatctgcaagtggacgtttggagggctttgtggtttgtggtggaaaaggaaatatcttcacctaaatactagatagaagcattctcagaagcttctctgtgatgactgcattcaactcacggagttgaacactccttttgagagcgtagttttgaaactctctttctgtggcatctgcaaggggacatgtagacctctttgaagatttcgttggaaacggaatcatcttcacataaaaactatacagaagcagtctcagaatcttctttgtgatgtttgcattcaaatcccagagttgaactttcctttcaaagttcacgtttgaaacactctttttgcaggatctacaagtggatatttggaccactctgtgtccttcgttcgaaacgggtatatcttcacacgacatctagacagaagctttctcagaaaattctttgggatgattgagtggaactcacagagctgaacattccttgcgatgtagcagtttagaaacacactttctgcagaatctgcaagtgcatatttggacctctctgaggaattcgttggaaacgggataatttcagctgactaaacagaagcattctcagaaccttcttcgtgatgtctgcattcaactcacagtgtggaacctttctttgatagttcaggtttgaaacactctttttgtagaaactgcaaggggataattgcacttctttgaggcctaccgtagtaaaggaaataacttcctatagaaagaagacagaagcattctcagaaccctcttcgtgatgtttgcattcaactcacagtgctgaacctttctttgatagttcagctttgaaacactcttcttgtagaaactgcaagtggatatttggtcctctctgaggatttcgttggaaacgggataaaccgcacagaactaaacagaagaattctcagagccctcttcgtgatgtttgcattcaactcacagtgctgaacctttctttgatagtgcagcttcgaaacactctttttgtagaaactgcaagtggatgtttggtcctctctgaggatttcgttggaaacgggataaaccgcacagaactaaaacagaagcattctcagaaccttcttcgtgatgtttgcattcaactcacagtgttgaacctttctttgatagttcaggtttgaaacggtctttctgcagaaactgcaagtagatatttggaccgctctgaggatttcgttggaaacgggataacccgcacagaactaaaacagaagcattcacagaaaactcttggtgacgactgagtttaactcacagagctgaacattcctttggatggagcagtttcgaaacacactatttgtagaatgtgcaagtggatatttaggcctctctgaggatttcgttggaaacgggttaaaccgcacagaactaaacagaagcattctcagaaactactttgtgatgattgcattcaagtcacagagttgaacattccctttgacagagcagtttggaaactctctttgtgtagaatctgcaagtggagatatggaccgctttgaggcctatggtagtaaaggaaatagcttcatataaaagctagacagtatcattctcagaaacgtctttgtgatgcttgcattcaactcacagagttgaactttcctttcgagagagaagctttgaaacactctttttccagaatgtgcaagtggacatttggggagctttgaggcctgtggtggaaaaggaattatcttcccgtaaaagctagatagaagcattgtcagaaacttctttgtgatgattgcattcaactcacagagttgaaggttccttttcaaacagcagtttccaatcactctttctgtggaatctgcaagtggatatttcgacctctttgaagatttcgttggaaacgggagaatcttcacagaaaagctaaacagaagcattctcagaaacttctctgtgatgtttgtgttcaactcccagagtttcacgttgcttttcatagagtagttctgaaacatgcttttcgtagtgtctgcaagtggacatttggagcgctttcaggcctgtggtggaaaacgaattatggtcacttaaaaactggagagaagctttctcagaaacttctctgtgatgattgcattcaactcacagagttgaaccctcctatggatagagcagtgttgaaactctctttttgtggaatctgcaagtggatatgtggacctctccgaagatgtctttggaaacgggaatatcttcacataataactaaacagaagcattctcagaaacttcttggtgatgtttgcattcaaatcccagagttgaaccttcctttgatagttcaggtttgaaacactctttctgtaggatctgcaagtggctatttggaccactctgtggccttcgttcgaaacgggtatatcttcgcataaaatctagacagaagcattctcagaaaatactttgtgatgattgagtttaaatcacagagctgaccattcctttggatggagcaggtttgagacacactttttgtagaatctacaagtggatatttggacctctctgaggatttcgttggaaacgggataactgcacctaactaaacggaagcattctcagaaactgctttgtgatgattgcattcacctcacagagttgaacattcctattgatagagcagtttggaaacactcttgttgtggaatgtgcaagtggagatttggagcgctttgaggcctatggtagtaaagggaatagcttcatagaaaaactagacagatgcattctcaggaactttttggtgatgtttgtattcaactcccagagttgaactttcctttggaaagagcagctatgaaacactctttttctagaatctgcaagtggacgtttggagggctttgtggtttgtggtggaaaaggaaatatcttcacctaaatactagatagaagcattctcagaagcttctctgtgatgactgcattcaactcacggagttgaacactccttttgagagcgcagttttgaaactctctttctgtggcatctgcaaggggacatgtagacctctttgaagatttcgttggaaacggaatcatcttcacataaaaactatacagaagcagtctcagaatcttctttgtgatgtttgcattcaaatcccagagttgaactttcctttcaaagttcacgtttgaaacactctttttgcaggatctacaagtggatatttggaccactctgtgtccttcgttcgaaacgggtatatcttcacacgacatctagacagaagctttctcagaaaattctttgggatgattgagtggaactcacagagctgaacattccttgcgatgtagcagtttagaaacacactttctgcagaatctgcaagtgcatatttggacctctctgaggaattcgttggaaacgggataatttcagctgactaaacagaagcattctcagaacttcttcgtgatgtctgcattcaactcacagtgtggaacctttctttgatagttcaggtttgaaacactctttttgtagaaactgcaaggggataattgcacttctttgaggcctaccgtagtaaaggaaataacttcctatagaaagaagacagaagcattctcagaaccctcttcgtgatgtttgcattcaactcacagtgctgaacctttctttgatagttcagctttgaaacactctttttgtagaaactgcaagtggatatttggtcctctctgagcatttcgttggaaacgggataaactgcacagaactaaacagaagcattctcagaaccttcttcgtgatgtttgcattcaactcacagtgttgaacctttctttgatagttcaggtttgaaacggtctttctgtagaaactgcaagtagatatttggacctctctgaggatttcgttggaaacgggataacccgcacagaactaaaacagaagcattcacagaaaactcttggtgacgactgagtttaactcacagagctgaacattcctttggatggagcagtttcgaaacacactatttgtagaatgtgcaagtggatatttaggcctctctgaggatttcgttggaaacgggataaaccgcacagaactaaacagaagcattctcagaaactactttgtgatgattgcattcaagtcacagagttgaacattccctttgacagagcagtttggaaactctctttgtgtagaatctgcaagtggagatatggaccgctttgatgactatggtagtaaaggaaatagcttcatataaaagctagacagtagcattctcagaaacttctttgtgatgcttgcattcaactcacagagttgaactttcctttcgagagagaagctttgaaacactctttttccagaatctgcaagtggacatttggagggctttgaggcctgtggtggaaaaggaattatcttccagtaaaagctagatagaagcattgtcagaaacttctttgtgatgattgcattcaactcacagagttgaaggttccttttcaaacagcagtttccaatcactctttctgtggaatctgcaagtggatatttggacctctttgaagatttcattggaaacgggataatcttcacagaaaagctaaacagaagcattctcagaaacttctctgtgatgtttgtgttcaactcccagagtttcacattgcttttcatagagtagttctgaaacatgcttttcgtagtgtctacaagtggacatttggagcgctttcaggcctgtggtggaaaacgaattatggtcacataaaaactggagagaagccttctcaggaaacttctctgtgatgattgcattcaactcacagagttgaaccctcctatggatagagcagtgttgaaactctctttttgtggaatctgcaagtggatatgtggacctctccgaagatgtctttggaaacgggaatatcttcacataaaaactaaacagaagcattctcagaaacttcttggtgatgtttgcattcaaatcccagagttgaaccttcctttgatagttcaggtttgaaacactctttctgtaggatctgcaagtggctatttggaccactctgtggccttcgttcgaaacgggtatatcttcgcataaaatctagacagaagcattctcaggaaaatactttgtgatgattgagtttaaatcacagagctgaccattcctttggatggagcaggtttgagacacactttttgtagaatctacaagtggatatttggacctctctgaggatttcgttggaaacgggataactgcacctaactaaacggaagcattctcagaaactgctttgtgatgattgcattcacctcacagagttgaacattcctattgatagagcagtttggaaacactcttgttgtggaatgtgcaagtggagatttggagcgctttgaggcctatggtagtaaagggaatagcttcatagaaaaactagacagatgcattctcaggaactttttggtgatgtttgtattcaactcccagagttgaactttcctttggaaagagcagctatgaaacactctttttctagaatctgcaagtgtacgtttggagggctttgtggtttgtggtggaaaaggaaatatcttcacctaaatactagatagaagcattctcagaagcttctctgtgatgactgcattcaactcacggagttgaacactccttttgagagcgcagttttgaaactctctttctgtggcatctgcaaggggacatgtagacctctttgaagatttcgttggaaacggaatcatcttcacatcaaaactatacagaagcagtctcagaatcttctttgtgatgtttgcattcaaatcccagagttgaactttcctttcaaagttcacgtttgaaacactctttttgcaggatctacaagtggatatttggaccactctgtgtccttcgttcgaaacgggtatatcttcacacgacatctagacagaagctttctcagaaaattctttgggatgattgagtggaactcacagagctgaacattccttgcgatgtagcagtttagaaacacactttctgcagaatctgcaagtgcatatttggacctctctgaggaattcgttggaaacgggataatttcagctgactaaacagaagcattctcagaaccttcttcgtgatgtctgcattcaactcacagtgtggaacctttctttgatagttcaggtttgaaacactctttttgtagaaactgcaaggggataattgcacttctttgaggcctaccgtagtaaaggaaataacttcctatagaaagaagacagaagcattctcagaaccctcttcgtgatgtttgcattcaactcacagtgctgaacctttctttgatagttcagctttgaaacactcttcttgtagaaactgcaagtggatatttggtcctctctgaggatttcgttggaaacgggataaaccgcacagaactaaacagaagaattctcagagccctcttcgtgatgtttgcattcaactcacagtgctgaacctttctttgatagtgcagctttgaaacactctttttgtagaaactgcaagtggatgtttggtcctctctgaggatttcgttggaaacgggataaaccgcacagaactaaaacagaagcattgtcagaaacttctttgtgatgattgcattcaactcacagagttgaaggttccttttcaaacagcagtttccaatcactctttctgtggaatctgcaagtggatatttgggcctctctgaggatttcgttggaaacgggataaaacgcacagaactaaaacagaagcattctcagaaacttctctgtgatgtttgtgttcaactcccagagtttcacgttgcttttcatagagtagttctgaaacatgcttttcgtagtgtctgcaagtggacatttggagcgctttcaggcctgtggtggaaaacgaattatggtcacataaaaactggagagaagccttctcagaaacttctctgtgatgattgcattcaactcacagagttgaaccctcctatggatagagcagtgttgaaactctctttttgtggaatctgcaagtggatatgtggacctctccgaagatgtctttggaaacgggaatatcttcacataaaaactaaacagaagcattctcagaaacttcttggtgatgtttgcattcaaatcccagagttgaaccttcctttgatagttcaggtttgaaacactctttctgtaggatctgcaagtggctatttggaccactctgtggccttcgttcgaaacgggtatatcttcgcataaaatctagacagaagcattctcagaaaatactttgtgatgattgagtttaaatcacagagctgaccattcctttggatggagcaggtttgagacacactttttgtagaatctacaagtggatatttggacctctctgaggatttcgttggaaacgggataactgcacctaactaaacggaagcattctcagaaactgctttgtgatgattgcattcacctcacagagttgaacattcctattgatagagcagtttggaaacactcttgttgtggaatgtgcaagtggagatttggagcgctttgaggcctatggtagtaaagggaatagcttcatagaaaaactagacagatgcattctcaggaaccttttggtgatgtttgtattcaactcccagagttgaactttcctttggaaagagcagctatgaaacactctttttctagaatctgcaagtggacgtttggagggctttgtggtttgtggtggaaaaggaaatatcttcacctaaatactagatagaagcattctcagaagcttctctgtgatgactgcattcaactcacggagttgaacactccttttgagagcgcagttttgaaactctctttctgtggcatctgcaaggggacatgtagacctctttgaagatttcgttggaaacggaatcatcttcacataaaaactatacagaagcagtctcagaatcttctttgtgatgtttgcattcaaatcccagagttgaactttcctttcaaagttcacgtttgaaacactctttttgcaggatctacaagtggatatttggaccactctgtgtccttcgttcgaaacgggtatatcttcacacgacatctagacagaagctttctcagaaaattctttgggatgattgagtggaactcacagagctgaacattccttgcgatggagcagtttagaaacacactttctgcagaatctgcaagtgcatatttggacctctctgaggaattcgttggaaacgggataatttcagctgactaaacagaagcattctcagaaccttcttcgtgatgtctgcattcaactcacagtgtggaacctttctttgatagttcaggtttgaaacactctttttgtagaaactgcaaggggataattgcacttctttgaggcctaccgtagtaaaggaaataacttcctatagaaagaagacagaagcattctcagaaccctcttcgtgatgtttgctttcaactcacggtgctgaacctttctttgatagttcagctttgaaacactctttttgtagaaactgcaagtggatatttggtcctctctgaggatttcgttggaaacgggataaaccgcacagaactaaacagaagcattctcagaaccttcttcgtgatgtttgcattcaactcacagtgttgaacctttctttgatagttcaggtttgaaacgatctttctgtagaaactgcaagtagatatttggacctctctgaggatttcgttggaaacgggataaaccgcacagaactaaaacagaagcattcacagaaaactcttggtgacgactgagtttaactcacagagctgaacattcctttggatggagcagtttcgaaacacactatttgtagaatgtgcaagtggatatttgggcctctctgaggatttcgttggaaacgggataaaccgcacagaactaaacagaagcattctcagaaactactttgtgatgattgcattcaagtcacagagttgaacattccctttgacagagcagtttggaaactctctttgtgtagagtctgcaagtggagatatggaccgctttgaggcctatggtagtaaaggaaatggcttcatatgaaagctagacagtagcattctcagaaacttctttgtgatgcttgcattcaactcacagagttgaactttcctttcgagagagaagctttgaaacactctttttccagaatgtgcaagtggacatttggagggctttgaggcctgtggtggaaaaggaattatcttcccgtagaagctagatagaagcattgtcagaaacttctttgtgatgattgcattcaactcacagagttgaaggttccttttcaaacagcagtttccaatcactctttctgtggaatctgcaaggggatatttcaacctctttgaagatttcgttggaaaagggagaatcttcacagaaaagctaaacagaagcattctcagaaacttctctgtgatgtttgtgttcaactcccagagtttcacgttgcttttcatagagtagttctgaaacatgcttttcgtagtgtctgcaagtggacatttggagcgctttcaggcctgtggtggaaaacgaattatggtcacataaaaactggagagaagccttctcagaaacttctctgcgatgattgcattcaactcacagagttgaaccctcgtatggatagagcagtgttgaaactatgtttttgtggaatctgcaagtggatatgtggacctcgccgaagatgtctttggaaacgggaatatcttcacataaaaactaaacagaagcattctcagaaacttcttggtgatgtttgcattcaaatcccagagttgaaccttcctttgatagttcaggtttgaaacactctttctgtaggatctgcaagtggctatttggaccactctgtggccttcgttcgaaacgggtatatcttcgcataaaatctagacagaagcattctcagaaaatactttgtgatgattgagtttaaatcacagagctgaccattcctttggatggagcaggtttgagacacactttttgtagaatctacaagtggatatttggacctctctgaggatttcgttggaaacgggataactgcacctaactaaacggaagcattctcagaaactgctttgtgatgattgcattcacctcacagagttgaacattcctattgatagagcagtttggaaacactcttgttgtggaatgtgcaagtggagatttggagcgctttgaggcctgtggtagtaaagggaatagcttcatagaaaaactagacagatgcattctcaggaactttttggtgatgtttgtattcaactcccagagttgaactttcctttggaaagagcagctatgaaacactctttttctagaatctgcaagtggacgtttggagggctttgtggtttgtggtggaaaaggaaatatcttcacctaaatactagatagaagcattctcagaagcttctctgtgatgactgcattcaactcacggagttgaacactccttttgagagcgcagttttgaaactctctttctgtggcatctgcaaggggacatgtagacctctttgaagatttcgttggaaacggaatcatcttcacataaaaactatacagaagcagtctcagaatcttctttgtgatgtttgcattcaaatcccagagttgaactttcctttcaaagttcacgtttgaaacactctttttgcaggatctacaagtggatatttggaccactctgtgtccttcgttcgaaacgggtatatcttcacacgacatctagacagaagctttctcagaaaattctttgggatgattgagtggaactcacagagctgaacattccttgcgatgtagcagtttagaaacacactttctgcagaatctgcaagtgcatatttggacctctctgaggaattcgttggaaacgggataatttcagctgactaaacagaagcattctcagaaccttcttcgtgatgtctgcattcaactcacagtgtggaacctttctttgatagttcaggtttgaaacactctttttgtagaaactgcaaggggataattgcacttctttgaggcctaccgtagtaaaggaaataacttcctatagaaagaagacagaagcattctcagaaccctcttcgtgatgtttgcattcaactcacagtgctgaacctttctttgatagttcagctttgaaacactcttcttgtagaaactgcaagtggatatttggtcctctctgaggatttcgttggaaacgggataaaccgcacagaactaaacagaagaattctcagagccctcttcgtgatgtttgcattcaactcacagtgctgaacctttctttgatagtgcagctttgaaacactctttttgtagaaactgcaagtggatgttttggtcctctctgaggatttcgttggaaacgggataaaccgcacagaactaaaacagaagcattgtcagaaacttctttgtgatgattgcattcaactcacagagttgaaggttccttttcaaacagcagtttccaatcactctttctgtggaatctgcaagtggatatttgggcctctctgaggatttcattggaaacgggataaaacgcacagaactaaaacagaagcattctcagaaacttctctgtgatgtttgtgttcaactcccagagtttcacgttgcttttcatagagtagttctgaaacatgcttttcgtagtgtctgcaagtggacatttggagcgctttcaggcctgtggtggaaaacgaattatggtcacataaaaactggagagaagccttctcagaaacttctctgtgatgattgcattcaactcacagagttgaaccctcctatggatagagcagtgttgaaactctctttttgtggaatctgcaagtggatatgtggacctctccgaagatgtctttggaaacgggaatatcttcacataaaaactaaacagaagcattctcagaaacttcttggtgatgtttgcattcaaatcccagagttgaaccttcctttgatagttcaggtttgaaacactctttctgtaggatctgcaagtggctatttggacaactctgtggccttcgttcgaaacgggtatatcttcgcataaaatctagacaaaagcattctcagaaaatactttgtgatgattgagtttaaatcacagagctgaccattcctttggatggagcaggtttgagacacactttttgtagaatctacaagtggatatttggacctctctgaggatttcgttggaaacgggataactgcacctaactaaacggaagcattctcagaaactgctttgtgatgattgcattcacctcacagagttgaacattcctattgatacagcagtttggaaacactcttgttgtggaatgtgcaagtggagatttggagcgctttgaggcctatggtagtaaagggaatagcttcatagaaaaactagacagatgcattctcaggaactttttggtgatgtttgtattcaactcccagagttgaactttcctttggaaagagcagctatgaaacactctttttctagaatctgcaagtggacgtttggagggctttgtggtttgtggtggaaaaggaaatatcttcacctaaatactagatagaagcattctcagaagcttctctgtgatgactgcattcaactcacggagttgaacactccttttgagagcgcagttttgaaactctctttctgtggcatctgcaaggggacatgtagacctctttgaaggtttcgttggaaacggaatcatcttcacataaaaactatacagaagcagtctcagaatcttctttgtgatgtttgcattcaaatccccgagttgaactttcctttcaaagttcacgtttgaaacactctttttgcaggatctacaagtggatatttggaccactctgtgtccttcgttcgaaacgggtatatcttcacatgacatctagacagaagctttctcagaaaattgtttgggatgattgatttgaactcacagagctgagcattccttgcgatgtagcagtttagaaacacactttctgcagaatctgcaagtgcatatttggacctctctgaggaattcgttggaaacgggataatttcagctgactaaacagaaagcattctcagaaccttcttcgtgatgtctgcattcaactcacagtgtggaacctttctttgatagttcaggtttgaaacactctttttgtagaaactgcaaggggataattgcactctttgaggagtaccgtagtaaaggaaataacttcctctaaaaagaagacagaagcattctcagaaccctcttcgtgatgtttgcattcaactcacagtgctgaacctttctttgatagttcagctttgaaacactctttttgtagaaactgcaagtggatatttggtcctctctgaggatttcgttggaaacgggataaactgcacagaactaaacagaagcattctcagaaccttcttcgtgatgtttgcattcaactcacagtgttgaacctttctttgatagttcaggtttgaaacggtctttctgtagaaactgcaagtagatatttggacctctctgaggatttcgttggaaacgggataacccgcacagaactaaaacagaagcattcacagaaaactcttggtgacgactgagtttaactcacagagctgaacattcctttggatggagcagtttcgaaacacactatttgtagaatgtgcaagtggatatttgggcctctctgaggatttcgttggaaacgggataaaccgcacagaactaaacagaagcattctcagaaactactttgtgatgattgcattcaagtcacagagttgaacatttcctttgacagagcagtttggaaactctctttgtgtagaatctgcaagtggagatatggaccgctttgaggcctatggtagtaaaggaaatagcttcatataaaagctagacagtagcattctcagaaacttctttgtgatgcttgcattcaactcacagagttgaactttcctttcgagagagaagctttgaaacactctttttccagaatgtgcaagtggacatttggggagctttgaggcctggggtggaaaaggaattatcttcccgtaaaagctagatagaagcattgtcagaaacttctttgtgatgattgcattcaactcacagagttgaaggttccttttcaaacagcagtttccaatcactctttctgtggaatctgcaagtggatatttcgacctctttgaagatttcgttggaaacgggagaatcttcccagaaaagctaaacagaagcattctcagaaacttctctgtgatgtttgtgttcaactcccagagtttcacattgcttttcatagagtagttctgaaacatgcttttcgtagtgtctacaagtggacatttggagcgctttcaggcctgtggtggaaaacgaattatggtcacataaaaactggagagaagccttctcagaaacttctctgtgatgattgcattcaactcacagagttgaaccctcctatggatagagcagtgttgaaactctctttttgtggaatctgcaagtggatacgtggacctctccgaagatgtctttggaaacgggaatatcttcacataaaaactaaacagaagcattctcagaaacttcttggtgatgtttgcattcaaatcccagagttgaaccttcctttgatagttcaggtttgaaacactctttttgtaggatctgcaagtggatatttggaccactctgtggccttcgttcgaaacgggtatatcttcgcataaaatctagacagaagcattctcagaaaatacttcgtgatgattgagtttaactcacagagctgaacattcctttggatggagcaggtttgagacacactttttgtagaatctacaagtggatatttggacctctctgaggatttcgttggaaacgggataactgcacctaactaaacggaagcattctcagaaactgctttgtgatgattgcattcacctcacagagttgaacattcctattgatagagcagtttggaaacactcttgttgtggaatgtgcaagtggagatttggagcgctttgaggcctatggtagtaaagggaatagcttcatagaaaaactagacagatgcattctcagcaactttttggtgatgtttgtattcaactcccagagttgaactttcctttggaaagagcagctatgaaacactctttttctagaatctgcaagtggacgtttggagggctttgtggtttgtggtggaaaaggaaatatcttcacctaaatactagatagaagcattctcagaagcttctctgtgatgactgcattcaactcacggagttgaacactccttttgagagcgcagttttgaaactctctttctgtggcatctgcaaggggacatgtagacctctttgaagatttcgttggaaacggaatcatcttcacatcaaaactatacagaagcagtctcagaatcttctttgtgatgtttgcattcaaatcccagagttgaactttcctttccaagttcacgtttgaaacactctttttgcaggatctacaagtggatatttggaccactctgtgtccttcgttcgaaacgggtatatcttcacatgacatctagacagaagctttctcagaaaattctttgggatgattgagtggaactcacagagctgaacattccttgcgatggagcagtttagaaacacactttctgcagaatctgcaagtgcatatttggacctctctgaggaattcgttggaaacgggataatttcagctgactaaacagaagcattctcagaaccttcttcgtgatgtctgcattcaactcacagtgtggatcctttctttgatagttcaggtttgaaacactctttttgtagaaactgcaagggtataattgcacttctttgaggcctaccgtagtaaaggaaataacttccaatagaaagaagacagaagcattcacagaaaactcttggtgacgactgagtttaactcacagagctgaacattcctttggatggagcagtttcgaaacacactatttgtagaatgtgcaagtggatatttgggcctctctgaggatttcgttggaaacgggataaaccgcacagaactaaacagaagcattctcagaaactaatttgtgacgattgcattcaagtcacagagttgaacattccctttgacagagcagtttggaaactctctttgtgtagaatctgcaagtggagatatggaccgctttgaggcctatggtagtaaaggaaagagcttcatataaaagctagacagtagcattctcagaaacttctttgtgatgcttgcattcaactcacagagttgaactttcctttcgagagagaagctttgaaacactctttttccagaatgtgcaagtggagatttggagggctttgaggcctgtggtggaaaaggaattatcttcccgtaaaagctagatagaagcattgtcagaaacttctttgtgatgattgcattcaactcacagagttgaaggttccttttcaaacagcagtttccaatcactctttctgtggaatctgcaagtggatatttgggcctctctgaggatttcgttggaaacgggataaaacgcacagaactaaaacagaagcattctcagaaacttctctgtgatgtttgtgttcaactcccagagtttcacgttgcttttcatagagtagttctgaaacatgcttttcgtagtgtctgcaagtggacatttggagcgctttcaggcctgtggtggaaaacgaattatggtcacataaaaactgggagagaagccttctcagaaacttctctgtgatgattgcattcaactcacagagttgaaccctcctatgggtagagcagtgttgaaactctctttttgtggaatctgcaagtggatatgtggacctctccgaagatgtctttggaaacgggaatatcttcacataaaaactaaacagaagcattctcagaaacttcttggtgatgtttgcattcaaatcccagagttgaaccttcctttgatagttcaggtttgaaacactctttctgtaggatctgcaagtggctatttggaccactctgtggccttcgttcgaaacgggtatatcttcgcataaaatctagacagaagcattctcagaaaatactttgtgatgattgagtttaaatcacagagctgaccattcctttggatggagcaggtttgagacacactttttgtagaatctacaagtggatatttggacctctctgaggatttcgttggaaacgggataactgcacctaactaaacggaagcattctcagaaactgctttgtgatgattgcattcacctcacagagttgaacattcctattgatagagcagtttggaaacactcttgttgtggaatgtgcaagtggagatttggagcgctttgaggcctatggtagtaaagggaatagcttcatagaaaaactagacagatgcattctcaggaactttttggtgatgtttgtattcaactcccagagttgaactttcctttggaaagagcagctatgaaacactctttttctagaatctgcaagtggacgtttggagggctttgtggtttgtggtggaaaaggaaatatcttcacctaaatactagatagaagctttctcagaagcttctctgtgatgactgcattcaactcacggagttgaacactccttttgagagcgcagttttgaaactccctttctgtggcatctgcaaggggacatgtagacctctttgaagatttcgttggaaacggaatcatcttcacataaaaactatacagaagcagtctcagaatcttctttgtgatgtttgcattcaaatcccagagttgaactttcctttcaaagttcacgtttgaaacactctttttgcaggatctacaagtggatatttggaccactctgtgtccttcattcgaaacgggtatatcttcacacgacatctagacagaaagctttctcagaaaattctttgggatgattgagtggaactcacagagctgaacattccttgcgatgtagcagtttagaaacacactttctgcagaatctgcaagtgcatatttggacctctctgaggaattcgttggaaacgggataatttcagctgactaaacagaagcattctcagaaccttcttcgtgatgtctgcattcaactcacagtgtggaacctttctttgatagttcaggtttgaaacactctttttgtagaaactgcaaggggataattgcacttctttgaggcctaccgtagtaaaggaaataacttcctatagaaagaagacagaagcattctcagaaccctcttcgtgatgtttgcattcaactcacagtgctgaacctttctttgatagttcagctttgaaacactcttcttgtagaaactgcaagtggatatttggtcctctctgaggatttcgttggaaacgggataaaccgcacagaactaaacagaagcattctcagaaccttcttcgtgatgtttgcattcaactcacagtgttgaacctttctttgatagttcaggttggaaacggtctttctgtagaaactgcaagtagatatttggacctctctgaggatttcgttggaaacgggataaaccgcaaagaactaaaacagaagcattcacagaaaactcttggtgacgactgagtttaactcacagagctgaacattcctttggatggagcagtttcaaaacacactatttgtagaatgtgcaagtggatatttgggcctctctgaggatttcattggaaacgggataaaccgcacagaactaaacagaagcattctcagaaactactttgtgacgattgcattcaagtcacagagttgaacattccctttgacagagcagtttggaaactctctttgtgtagaatctgcaagtggagatatggaccgctttgaggcctatggtagtaaaggtaatagcttcatatgaaagctagacagtagcattctcagaaacttctttgtgatgcttgcattcaactcacagagttgaactttcctttcgagagagaagctttgaaacactctttttccagaatgtgcaagtggacatttggagggctttgaggcctgtggtggaaaaggaattatcttcccgtaaaagctagatagaagcattgtcagaaacttctttgtgatgattggattcaactcacagaggtgaaggttccttttcaaagagcagtttccaatcactctttctgtggaatctgcaagtggatatttggacctctttgaagatttcgttggaaacgggagaatcttcacagaaaagctaaacagaagcattctcagaaacttctctgtgatgtttgtgttcaactcccagagtttcacattgcttttcatagagtagttctgaaacatgcttttcgtagtgtctgcaagtggacatttggagcgctttcaggcctgtggtggaaaacgaattatggtcacataaaaactggagagaagccttctcagaaacttctctgtgatgattgcattcaactcacagatttgaaccctcctatggatagagcattgttgaaactctctttttgtggaatctgcaagtggatatgtggacctctccgaagatgtctttggaaacgggaatatcttcacataaaaactaaacagaagcattctcagaaacttcttggtgatgtttgcattccaatcccagagttgaaccttcctgtgatagttcaggtttgaaacactctttttgtagtatctgcaagtggatatttggaccactctgtggccttcgttcgaaacgggtacatcttcacataaaatctagacagaagcattctcaggaaaatactttgtgatgattgagtttaaatcacagagctgaccattcctttggatggagcaggtttgagacacactttttgtagaatctacaagtggatatttggacctctctgaggatttcgttggaaacgggataactgcacctaactaaacggaagcattctcagaaactgctttgtgatgattgcattcacctcacagagttgaacattcctattgatagagcagtttggaaacactcttgttgtggaatgtgcaagtggagatttggagcgctttgaggcctgtggtagtaaagggaatagcttcatagaaaaactagacagatgcattctcaggaactttttggtgatgtttgtattcaactcccagagttgaactttcctttggaaagagcagctatgaaacactctttttctagaatctgcaagtggacgtttggagggctttgtggtttgtggtggaaaaggaaatatcttcacctaaatactagatagaagcattctcagaagcttctctgtgatgactgcattcaactcacggagttgaacactccttttgagagcgcagttttgaaactctctttctgtggcatccgcaaggggacatgtggacctctttgaagatttcgttggaaacggaatcatcttcacataaaaactgtacagaagcagtctcagaatcttctttgtgatgtttgcattcaaatcccagagttgaactttcctttcaaagttcacgtttgaaacactctttttgcaggatctacaagtggatatttggaccactctgtgtccttcgttcgaaacgggtatatcttcacacgacatctagacagaagctttctcagaaaattctttgggatgattgagtggaactcacagagctgaacattccttgcgatgtagcagtttagaaacacactttctgcagaatctgcaagtgcatatttggacctctccgaggaattcgttggaaacgggataatttcagctgactaaacagaagcattctcagaaccttcttcgtgatgtctgcattcaactcacagtgtggaacctttctttgatagttcaggtttgaaacactctttttgtagaaactgcaaggggataattgcacttctttgaggcctaccgtagtaaaggaaataacttcctatagaaagaagacagaagcattctcagaaccctcttcgtgatgtttgcattcaactcacagtgctgaacctttctttgatagttcagctttgaaacactcttcttgtagaaactgcaagtggatatttggtcctctctgaggatttcgttggaaacgggataaaccgcacagaactaaacagaagaattctcagagccctattcgtgatgtttgcattcaactcacagtgctgaacctttctttgatagtgcagctttgaaacactctttttgtagaaactgcaagtcgatatttggtcctctctgaggatttcgttggaaacgggataaaccgcacagaactaaaacagaagcattcacagaaaactcttggtgacgactgagtttaactcacagagctgaacattcctttggatggagcagtttcgaaacacactatttgtagaatctgcaagtggatatttgggcctctctgaggatttcgttggaaacgggataaaacgcacagaactaaaacagaagcattctcagaaactactttgtgatgattgcattcaagtcacagagttgaagattccctttgacagagcagcttggaaactatctttgtgtagaatctgcaagtggagatatggaccgctttgaggcctatggtagtaaaggaaatagcttcatataaaagctagacagtagcattctcagaaacttctttgtgatgcttgcattcaactcacagagttgaactttcctttcgagagagaagctttgaaacactctttttccagaatctgcaagtggacatttggagggctttgaggcctgtggtggaaaaggaattatcttcccgtaaaagctagatagaagccttctcagaaacttctctgtgatgattgcattcaactcacagagttgaaggttccttttcaaagagcagtttccaatcactctttctgtggaatctgcaagtggatatttggacctattttgaagatttcgttggaaacgggagaatcttcacaggaaagctaaacagaagcattctcagaaacttcttggtgatgtttgcattcaaatcccagagtagaaccttcctttgatagttcaggtttgaaacactctttttgtaggatctgcaagtggatatttggaccactctgtggccttcgttcgaaacgggtatatcttcgcataaaatctagacagaagcattctcagaaaatactttgtgatgattgagtttaactcacagagctgaacattcctttggatggagcaggtttgagacacactttttgtagaatctacaagtggatatttggacctctctgaggatttcgttggaaacgcgataactgcacctaactaaacggaagcattctcagaaactgctttgtgatgattgcattcacctcacagagttgaacattcctattgatagagcagtttggaaacactcttgttgtggaatgtgcaagtggagatttggagcgctttgaggcctatggtagtaaagggaatagcttcatagaaaaactagacagatgcattctcaggtaactttttggtgatgtttgtattcaactcccagagttgaactttcctttggaaagagcagctatgaaacactctttttctagaatctgcaagtggacgtttggagggctttgtggtttgtggtggaaaaggaaatatcttcacctaaatactagatagaagcatcctcagaagcttctctgtgatgactgcattcaactcacggagttgaacactccttttgagagcgcagttttgaaactctctttctgtggcatctgcaaggggacatgtagacctctttgaagatttcgttggaaacggaatcatcttcacataaaaactatacagaagcagtctcagaatcttctttgtgatgtttgcattcaaatcccagagttgaacttgcctttcaaagttcacgtttgaaacactctttttgcaggatctacaagtggatatttggaccactctgtgtccttcgttcgaaacgggtatatcttcacatgacatctagacagaagctttctcagaaaattctttgggatgattgagtggaactcacagagctgaacattccttgcgatgtagcagtttagaaacacactttctgcagaatctgcaagtgcatatttggacctctctgaggaattcgttggaaacgggataatttcagctgactaaacagaaagcattctcaggaaccttcttcgtgatgtctgcattcaactcacagtgtggaacctttctttgatagttcaggtttgaaacactctttttgtagaaactgcaaggggataattgcacttctttgaggcctaccgtagtaaaggaaataacttcctatagaaagaagacagaagaattctcagagccctcttcgtgatgtttgcattcaactcacagtgctgaacctttctttgatagtgcagctttgaaacactctttttgtagaaactgcaagtggatgtttggtcctctctgaggatttcgttggaaacgggataaaccgcacagaactaaaacagaagcattgtcagaaacttctttgtgatgattgcattcaactcacagagttgaaggttccttttcaaacagcagtttccaatcactctttctgtggaatctgcaagtggatatttgggcctctctgaggatttcgttggaaacgggataaaacgcacagaactaaaacagaagcattctcagaaacttctctgtgatgtttgtgttcaactcccagagtttcacgttgcttttcatagagtagttctgaaacatgcttttcgtagtgtctgcaagtggacatttggagcgctttcaggcctgtggtggaaaacgaattatggtcacataaaaactggagagaagccttctcagaaacttctctgtgatgattgcattcaactcacagagttgaaccctcctatggatagagcagtgttgaaactctctttttgtggaatctgcaagtggatatgtggacctctccgaagatgtctttggaaacgggaatatcttcacataaaaactaaacagaagcattctcagaaacttcttggtgatgtttgcattcaaatcccagagttgaaccttcctttgatagttcaggtttgaaacactctttctgtaggatctgcaagtggctatttggaccactctgtggccttcgttcgaaacgggtatatcttcgcataaaatctagacagaagcattcttagaaaatactttgtgatgattgagtttaaatcacagagctgaccattcctttggatggagcaggtttgagacacactttttgtagaatctacaagtggatatttggacctctctgaggatttcgttggaaacgggataactgcacctaactaaacggaagcattcacagaaactgctttgtgatgattgcattcacctcacagagttgaacattcctattgatagagcagtttggaaacactcttgttgtggaatgtgcaagtggagatttggagcgctttgaggcctatggtagtaaagggaatagcttcatagaaaaactagacagatgcattctcaggaactttttggtgatgtttgtattcaactcccagagttgaactttcctttggaaagagcagctatgaaacactctttttctagaatctgcaagtggacgtttggagggctttgtggtttgtggtggaaaaggaaatatcttcacctaaatactagatagaagcattctcagaagcttctctgtgatgactgcattcaactcacggagttgaacactccttttgagagcgtagttttgaaactctctttctgtggcatctgcaaggggacatgtagacctctttgaagatttcgttggaaacggaatcatcttcacataaaaactatacagaagcagtctcagaatcttctttgtgatgtttgcattcaaatcccagagttgaactttcctttcaaagttcacgtttgaaacactctttttgcaggatctacaagtggatatttggaccactctgtgtccttcgttcgaaacgggtatatcttcacacgacatctagacagaagctttctcagaaaattctttgggatgattgagtggaactcacagagctgaacattcccttgcgatgtagcagtttagaaacacactttctgcagaatctgcaagtgcatatttggacctctctgaggaattcgttggaaacgggataatttcagctgactaaacagaagcattctcagaaccttcttcgtgatgtctgcattcaactcacagtgtggaacctttctttgatagttcaggtttgaaacactctttttgtagaaactgcaaggggataattgcacttctttgaggcctaccgtagtaaaggaaataacttcctatagaaagaagacagaagcattctcagaaccctcttcgtgatgtttgcattcaactcacagtgctgaacctttctttgatagttcagctttgaaacactcttcttgtagaaactgcaagtggatatttggtcctctctgaggatttcattggaaaagggataaaccgcacagaactaaacagaagcattctcagagccctcttcgtgatgtttgcattcaactcacagtgctgaacctttctttgatagtgcagctttgaaacactctttttgtagaaactgcaagtggatgtttggtcctctctgaggatttcgttggaaacgggataaaccgcacagaactaaaacagaagcattgtcagaaacttctttgtgatgattgcattcaactcacagagttgaaggttccttttcaaacagcagtttccaatcactctttctgtggaatctgcaagtggatatttgggcctctctgaggatttcgttggaaacgggataaaacgcacagaactaaaacagaagcattctcagaaacttctctgtgatgtttgtgttcaactcccagagtttcacgttgcttttcatagagtagttctgaaacatgcttttcgtagtgtctgcaagtggacatttggagcgctttcaggcctgtggtggaaaacgaattatggtcacataaaaactggagagaagccttctcagaaacttctctgtgatgattgcattcaactcacagagttgaaccctcctatggatagagcagtgttgaaactctctttttgtggaatctgcaagcggatatgtggacctctccgaagatgtctttggcaacgggaatatcttcacataaaaactaaacagaagcattctcagaaacttcttggtgatgtttgcattcaaatcccagagttgaaccttcctttgatagttcagggttgaaacactctttttgtaggatctgcaagtggatatttggaccactctgtggccttcgttcgaaacgggtacatcttcgcataaaatctagacagaagcattctcagaaaatactttgtgatgattgagtttaactcacagagctgaacattcctttggatggagcaggcttgagacacactttttgtagaatctacaagtggatatttggacctctctgaggatttcgttggaaacgggataactgcacctaactaagcggaagcattctcagaaactgctttgtgatgattgcactcacctcacagagttgaccgttactattgatagagcagtttggaaaccctcttgttgtggaatgtgcaagtggagatttggagcgctttgaggcctatggtagtaaagggaatagcttcatagaaaaactagacagatgcattctcaggaactttttggtgatgtttgtattcaactcccagagttgaactttcctttggaaagagcagctatgaaacactctttttctagaatctgcaagtggacgtttggagggctttgtggtttgtggtggaaaaggaaatatcttcacctaaatactagagagaagcattctcagaagcttctctgtgatgactgcattcaactcacggagttgaacactccttttgagagcgcagttttgaaactctctttctgtggcatccgcaaggggacatgtagacctctttgaagatttcgttggaaacggaatcatcttcacataaaaactatacagaagcagtctcagaatcttctttgtgatgtttgcattcaaatcccagagttgaactttcctttcaaagttcacgtttgaaacactctttttgcaggatctacaagtggatatttggaccactctgtgtccttcgttcgaaacgggtatatcttcacatgacatctagacagaagctttctcagaaaattctttgggatgattgagttgaactcacagagctgaacattccttgcgatggagcagtttagaaacacactttctgcagaatctgcaagtgcatatttggacctctctgaggaattcgttggaaacgggataatttcagccgactaaacagaagcattctcagaaccttcttcgtgatgtctgcattcaactcacagtgtggaacctttctttgatagttcaggtttgaaacactctttttgtagaaactgcaaggggataattgcacttctttcaggtctaccgtagtaaaggaaataacttcctataaaaagaagacagaagcattctcagaaccctcttcgtgatgtttgcattcaactcacagtgctgaacctttctttgatagttcagctttgaaacactctttttgtagaaactgcaagtggatatttggtcctctctgaggatttcgttggaaacgggataaaccgcacagaactaaacagaagcattctcagaaccttcttcgtgatgtttgcattcaactcacagtgttgaacctttctttgatagttcaggtttgaaacggtctttctgtagaaactgcaagtagatatttggacctctctgaggatttcgttggaaacgggataacccgcacagaactaaaacagaagcattcacagaaaacccttggtgacgactgagtttaactcacagagctgaacattccctaggttggagcagtttcgaaacacactctttgtagaatctgcaggtggatatttgggccactctgaggatttcgttggaaatgggataaaccgcacagaactaaaacagaagcattctcagaaactactttgtgatgattgcattcaagtcacagagttgaacattccctttgacggggcagtttggaaactctctttgtgtagaatctgcaagtggagatatggaatgctttgaggactatggtagtaaaggaaatagcttcatataaaagctagacagtagcattctcagaaacttctttgtgatgcttgcattcaactcacagagttgaactttcctttcgagagagaagctttgaaacactctttttccagaatctgcaagtggacatttggagggctttgaggcctgtggtggaaaaggaattatcttcccgtaaaagctagatagaagcattgtcagaaacttctttgtgatgattgcattcaactcacagagttgcaggttccttttcaaacagcagtttccaatcacactttctgtggaatctgcaagtggatgtttggacctctttgaagatttcgttggaaacgggagaatcttcacagaaaagctaaacagaagcattctcagaaacttctctgtgatgtttgtgttcaactcccagagtttcacattgcttttcatagagtagttctgaaacatgcttttcgtagtgtctgcaagtggacatttggagcgctttcaggcctgtggtggaaaacgaattatggtcacataaaaactggagagaagccttctcagaaacttctctgtgatgattgcattcaactcacagagttgaaccctcctatggatagagcagtgttgaaactctctttttgtggaatctgcaagtggatatgtggacctctccgaagatgtctttggaaacgggaatatcttcacataaaaactaaacagaagcattgtcagaaacttcttggtgatgtttgcattcaaatcccagagttgaaccttcctttgatagttcaggtttgaaacactctttttgtaggatctgcaagtggctatttggaccactctgtggccttcgttcgaaacgggtatatcttcgcataaaatctagacagaagcattctcagaaaatactttgtgatgattgagtttaaatcacagagctgaacattcctttggatggagcaggtttgagacacactttttgtagaatctacaagtggatatttggacctctctgaggatttcgttggaaacgggataactgcacctaactaaacggaagcattctcagaaactgctttgtgatgattgcattcacctcacagagttgaacattcctattgatagagcagtttggaaacactcttgttgtggaatgtgcaagtggagatttggagcgctttgaggcctatggtagtaaagggaatagcttcatagaaaaactagacagatgcattctcaggaactttttggtgatgtttgtattcaactcccagagttgaactttcctttggaaagagcagctatgaaacactctttttctagaatctgcaagtggacgtttggagggctttgtggtttgtggtggaaaaggaaatatcttcacctaaatactagatagaagcattctcagaagcttctctgtgatgactgcattcaactcacggagttgaacactccttttgagagcgcagttttgaaactctctttctgtggcatctgcaaggggacatgcagacctctttgaagatttcgttggaaacggaatcatcttcacataaaaactatacagaagcagtctcagaatcttctttgtgatgtttgcattcaaatcccagagttgaactttcctttcaaagttcacgtttgaaacactctttttgcaggatctacaagtggatatttggaccactctgtgtccttcgttcgaaacgggtatatcttcacacgacatctagacagaagctttctcagaaaattctttgggatgattgagtggaactcacagagctgaacattccttgcgatgtagcagtttagaaacacactttctgcagaatctgcaagtgcatatttggacctctctgaggaattcgttggaaacgggataatttcagctgactaaacagaagcattctcagaatcttcttcgtgatgtctgcattcaactcacagtgtggaacctttctttgatagttcaggtttgaaacactctttttgtagaaactgcaaggggataattgcacttctttgaggcctactgtagtaaaggacataacttcctataaaaagaagacagaagcattctcagaaccctcttcgtgatgtttgcattcaactcacagtgctgaacctttctttgatagttcagctttgaaacactcttcttgtagaaactgcaagtggatatttggtcctctctgaggatttcgttggaaacgggataaaccgcacagaactaaacagaagcattcacagaaaactcttggtgacgactgagtttaactcacagagctgaacattcctttggatggagcagtttcgaaacacactatttgtagaatgtgcaactggatatttgggcctctctgaggatttcgttggaaacgggatataccgcacagaactaaaacagaagcattctcagaaactactttgtgatgattgcattcaagtcacagagttgaacattccctttgacagagcagtttggaaactctctttgtgtagaatctgcaagtggagatatggaccgctttgaggcctatggtagtaaaggaaatagcttcatataaaagctagacagtagcattctcagaaacttctttgtgatgcttgcattcaactcacagagttgaactttcctttcgagagagaagctttgaaacactctttttccagaatgtgcaagtggacatttggggagctttgaggcctggggtggaaaaggaattatcttcccgtaaaagctagatagaagcattgtcagaaacttctttgtgatgattgcattcaactcacagagttgaaggttccttttcaaacagcagtttccaatcactctttctgtggaatctgcaagtggatatttcgacctctttgaagatttcgttggaaacgggagaatcttcacagaaaagcttaacagaagcattctcagaaacttctctgtgatgtttgtgttcaactcccagagtttcacgttgcttttcatagagtagttctgaaacatgcttttcgtagtgtctgcaagtggacatttggagcgctttcaggcctgtggtggaaaacgaattatggtcacataaaaactggagagaagccttctcagaaacttctctgtgatgattgcattcaactcacagagttgaaccctcctatggatagagcagtgttgaaactctctttttgtggaatctgcaagtggatatgtggacctcgccgaagatgtctttggaaacgggaatatcttcacataaaaactaaacagaagcattctcagaaacttcttggtgatgtttgcattcaaatcccagagttgaaccttcctttgatagttcaggtttgaaacactctttttgtaggatctgcaagtggctatttggaccactctgtggccttcgttcgaaacgggtatatcttcgcataaaatctagacagaaacattctcagaaaatactttgtgatgattgagtttaaatcacagagctgaacattcctttggatggagcaggtttgagacacactttttgtagaatctacaagtggatatttggacctctctgaggatttcgttggaaacgggataactgcacctaactaaacggaagcattctcagaaactgctttgtgatgattgcattcacctcacagagttgaacattcctattgatagagcagtttggaaacactcttgttgtggaatgtgcaagtggagatttggagcgctttgaggcctatggtagtaaagggaataccttcatagaaaaactagacagatgcattctcaggaactttttggtgatgtttgtattcaactcccagagttgaactttcctttggaaagagcagctatgaaacactctttttctagaatctgcaagtggacgtttggagggctttgtggtttgtggtggaaaaggaaatatcttcacctaaatactagatagaagcattctcagaagcttctctgtgatgactgcattcaactcacggagttgaacactccttttgagagcgcagttttgaaactctgtttctgtggcatctgcaaggggacatgtagacctctttgaagatttcgttggaaacggaatcatcttcacatcaaaactatacagaagcagtctcagaatcttctttgtgatgtttgcattcaaatcccagagttgaactttcctttcaaagttcacgtttgaaacactctttttgcaggatctacaagtggatatttggaccactctgtgtccttcgttcgaaacgggtatatcttcacatgacatctagacagaagctttctcagaaaattctttgggatgattgagttgaactcacagagctgaacattccttgtgatgtagcagtttagaaacacactttctgcagaatctgcaagtgcatatttggacctctctgaggaattcgttggaaacgggataatttcagctgactaaacagaagcattctcagaaccttcctcgtgatgtctgcattcaactcacagtgtggaacctttctttgatagttcagctttgaaacactctttttgtagaacctgcaaggggataattgcacttctttgaggcctaccgttgtaaaggaaataacttcctataaaaagaagacagaagcattctcagaaccctcttcgtgatgtttgcattcaactcacagtgctgaacctttctttgatagttcagctttgaaacactctttttgtagaaactgcaagtggatatttggtcctctctgaggatttctttggaaacgggataaaccgcacagaaccaaacagaagcattctcagaaccttcttcgtgatgtttgcattcaactcacagtgctgaacctttctttgatagttcagctttgaaacactctttttgtagaaactgcaagtggatatttggtcctctctgaggatttcgttggaaacgggataaaccgcacagaactaaaacagaagcattcacagaaaactcttggtgacgactgagtttaactcacagaactgaacattcctttggatggagcagtttcgaaacacactatttgtagaatgtgcaagtggatatgtgggcctctctgaggatttcgttggaaacgggataaaccgcacagaactaaacagaagcattctcagaaactactttgtgatgattgcattcaagtcacagagttgaacattccctttgacagagcagtttggaaactctctttgtgtagaatctgcaagtggagatatggaccgctttgaggcctatggtagtaaaggaaatagcttcatataaaagctagacagcagcattctcagaaacttctttgtgatgcttgcattcaactcacagagttgaactttcctttcgagagagaagctttgaaacactctttttccagaatctgcaagtggacatttggagggctttgaggcctgtggtggaaaaggaattatcttcccgtaaaagctagatagaagcattgtcagaaacttctttgtgatgattgcattcaactcacagagttgaaggttccttttcaaacagcagtttccaaacactctttctgtggaatctgcaagtggatatttggacctctttgaagatttctttggaaaggggataatcttcacagaaaagctaaacagaagcattctcagaaacttctctgtgatgtttgtgttcaactcccagagtttcacgttgcttttcatagagtagttctgaaacatgcttttcgtagtgtctgcaagtggacatttggagcgctttcaggcctgtggtggaaaacgaattatggtcacataaaaactggagagaagccttctcagaaacttctctgtgatgattgcattcaactcactgagttgaaccctcctattggatagagcagtgttgaaactctctttttgtggaatctgcaagtggatatgtggacctctccgaagatgtctttggaaacgggaatatcttcacataaaaactaaacagaagcattctcagaaacttcttggtgatgtttgcattcaaatcccagagttgaaccttcctttgatagttcaggtttgaaacactctttttgtaggatctgcaagtggctatttggaccactctgtggccttcgttcgaaacgggtatatcttcgcataaaatctagacagaagcattctcagaaaatactttgtgatgattgagtttaaatcacagagctgaacattcctttggatggagcaggtttgagacacacattttgtagaatctacaagtggatatttggacctctctgaggatttcgttggaaacgggataactgcacctaactaaacggaagcattctcagaaactgctttgtgatgattgcattcacctcacagagttgaacattcctattgatagagcagtttggaaacactcttgttgtggaatgtgcaagtggagatttggagcgctttgaggcctatggtagtaaagggaatagcttcatagaaaaactagacagatgcattctcaggaactttttggtgatgtttatattcaactcccagagttgaactttcctttggaaagagcagctatgaaacactctttttctagaatctgcaagtggacgtttggagggctttgtggtttgtggtggaaaaggaaatatcttcacctaaatactagatagaagcattctcagaagcttctctgtgatgactgcattcaactcacggagttgaacactccttttgagagcgcagttttgaaactctctttctgtggcatctgcaaggggacatgtagacctctttgaagatttcgttggaaacggaatcatcttcacataaaaactatacagaagcagtctcagaatcttctttgtgatgtttgcattcaaatcccagagttgaactttcctttcaaagttcacgtttgaaacactctttttgcaggatctacaagtggatatttggaccactctgtgtccttcgttcgaaacgggtatatcttcacatgacatctagacagaagctttctcagaaaattctttgggatgattgagtggaactcacagagctgaacattccttgcgatgtagcagtttagaaacacactttctgcagaatctgcaagtgcatatttggacctctctgaggaattcgttggaaacgggataatttcagctgactaaacagaagcattctcagaacttcttcgtgatgtctgcattcaactcacagtgtggaacctttctttgatagttcaggtttgaaacactctttttgtagaaactgcaaggggataattgcacttctttgaggcctaccgtagtaaaggaaataacttcctatagaaagaagacagaagaattctcagagccctcttcgtgatgtttgcattcaactcacagtgctgaacctttctttgatagtgcagctttgaaacactctttttgtagaaactgcaagtggatgtttggtcctctctgaggatttcgttggaaacgggataaaccgcacagaactaaaacagaagcattgtcagaaacttctttgtgatgattgcattcaactcacagagttgaaggttccttttcaaacagcagtttccaatcactctttctgtggaatctgcaagtggatatttgggcctctctgaggatttcgttggaaacgggataaaacgcacagaactaaaacagaagcattctcagaaacttctctgtgatgtttgtgttcaactcccagagtttcacgttgcttttcatagagtagttctgaaacatgcttttcgtagtgtctgcaagtggacatttggagcgctttcaggcctgtggtggaaaacgaattatggtcacataaaaactggagagaagccttctcagaaacttctctgtgatgattgcattcaactcacagagttgaaccctcctatggatagagcagtgttgaaactctctttttgtggaatctgcaagtggatatgtggacctctccgaagatgtctttggaaacgggaatatcttcacataaaaactaaacagaagcattctcagaaacttcttggtgatgtttgcattcaaatcccagagttgaaccttcctttgatagttcaggtttgaaacactctttctgtaggatctgcaagtggctatttggaccactctgtggccttcgttcgaaacgggtatatcttcgcataaaatctagacagaagcattctcagaaaatactttgtgatgattgagtttaaatcacagagctgaccattcctttggatggagcaggtttgagacacactttttgtagaatctacaagtggatatttggacctctctgaggatttcgttggaaacgggataactgcacctaactaaacggaagcattctcagaaactgctttgtgatgattgcattcacctcacagagttgaacattcctattgatagagcagtttggaaacactcttgttgtggaatgtgcaagtggagatttggagcgctttgaggcctgtggtagtaaagggaatagcttcatagaaaaactagacagatgcattctcaggaactttttggtgatgtttgtattcaactcccagagttgaactttcctttggaaagagcagctatgaaacactctttttctagaatctgcaagtggacgtttggagggctttgtggtttgtggtggaaaaggaaatatcttcacctaaatactagatagaagcattctcagaagcttctctgtgatgactgcattcaactcacggagttgaacactccttttgagagcgcagttttgaaactctctttctgtggcatctgcaaggggacatgtagacctctttgaagatttcgttggaaacggaatcatcttcacataaaaactatacagaagcagtctcagaatcttctttgtgatgtttgcattcaaatcccagagttgaactttcctttcaaagttcacgtttgaaacactctttttgcaggatctacaagtggatatttggaccactctgtgtccttcgttcgaaacgggtatatcttcacacgacatctagacagaagctttctcagaaaattctttgggatgattgagtggaactcacagagctgaacattccttgcgatgtagcagtttagaaacacactttctgcagaatctgcaagtgcatatttggacctctctgaggaattcgttggaaacgggataatttcagctgactaaacagaagcattctcagaaccttcttcgtgatgtctgcattcaactcacagtgtggaacctttctttgatagttcaggtttgaaacactctttttgtagaaactgcaaggggataattgcacttctttgaggcctaccgtagtaaaggaaataacttcctatagaaagaagacagaagcattctcagaaccttcttcgtgatgtttgcattcaactcacagtgttgaacctttctttgatagttcaggtttgaaacggtctttctgtagaaactgcaaggagatactaggacctctctgaggatttcgttggaaacgggataaatcgcacagaaataaacagaagcattcacagaaaactcttggtgacgactgagtttaactcacagagctgaacattcctttggatggagccgtttcgaaacacactatttgtagaatgtgcaagtggatatttgggcctctctgaggatttcgttggaaacgggataaaccgcacagaactaaacagaagcattctcagaaactactttgtgatgattgcattcaagtcacagagttgaacattccctttgacagagcagtttggaaactctctttgtgtagaatctgcaagtggagctatggaccgctttgaggcctatggtagtaaaggaaatagtttcatataaaagctagacagcagcattctcagaaacttctttgtgatgcttgcattcaactcacagagttgaactttcctttcgagagagaagctttgaaacactctttttccagaatctgcaagtggacatttggagggctttgaggcctgtggtggaaaaggaattatcttcccgtaaaagctagatagaagcattgtcagaaacttctttgtgatgattgcattcaagtcacagagttgaaggttccttttcaaagagcagtttccaatcactctttctgtggaatctgcaagtggatatttggacctctttgaacatttcgttggaaacgggagaatcttcacagaaaagctaaacagaagcattctcagaaacttctctgtgatgtttgtgttcaactcccagagtttcacgttgcttttcatagagtagttctgaaacatgcttttcgtagtgtctgcaagtggacatttggagcgctttcaggcctgtggtggaaaacgaattatggtcacataaaaactggagagaaagccttctcagaaacttctctgtgatgattgcattcaactcacagagttgaaccctcctatggatagagcagtgttgaaactctctttttgtggaatctgcaagtggatatgtggacctctccgaagatgtctttggaaacgggaatatcttcacataaaaactaaacagagcattctcagaaacttcttggtgatgtttgcattcaaatcccagagttgaaccttcctttgatagttcaggtttgaaacactctttctgtaggatctgcaagtggctatttggaccactctgtggccttcgttcgaaacgggtatatcttcgcataaaatctagacagaagcattctcagaaaatactttgtgatgattgagtttaaatcacagagctgaccattcctttggatggagcaggtttgagacacactttttgtagaatctacaagtggatatttggacctctctgaggatttcgttggaaacgggataactgcacctaactaaacggaagcattctcagaaactgctttgtgatgattgcattcacctcacagagttgaacattcctattgatagagcagtttggaaacactcttgttgtggaatgtgcaagtggagatttggagcgctttgaggcctgtggtagtaaagggaatagcttcatagaaaaactagacagatgcattctcaggaactttttggtgatgtttgtattcaactcccagagttgaactttcctttggaaagagcagctatgaaacactgtttttctagaatctgcaagtggacgtttggagggctttgtggtttgtggtggaaaaggaaatatcttcacctaaatactagatagaagcattctcagaagcttctctgtgatgactgcattcaactcacggagttgaacactccttttgagagcacagttttgaaactctctttctgtggcatctgcaaggggacatgtagacctctttgaggatttccttggaaacggaatcatcttcacaaaaaaactatacagaagcagtctcagaatcttctttgtgatgtttgcattcaaatcccagagttgaactttcctttcaaagttcacgtttgaaacactctttttgcaggatctacaagtggatatttggaccactctgtgtccttcgttcgaaacgggtatatcttcacatgacatctagacagaagctttctcagaaaattctttgggatgattgagtggaactcacagagctgaacattccttgcgatgtagcagtttagaaacacactttctgcagaatctgcaagtgcatatttggacctctctgaggaattcgttggaaacgggataatttcagctgactaaacagaagcattctcagaaccttcttcgtgatgtctgcattcaactcacagtgtggaagctttctttgatagttcaggtttgaaacactctttttgtagaaactgcaaggggataattgcactgctttgaggcctaccgtagtaaaggaaataacttcctataaaaagaagacagaagcattctcagaaccctcttcgtgatgtttgcattcaactcacagtgctgaacctttctttgatagttcagctttgaaacactcttcttgtagaaactgcaagtggatatttggtcctctctgaggatttcgttggaaacgggataaaccgcacagaactaaacagaagaattctcagagccttcttcgtgatgtttgcattcaactcacagtgctgaacctttctttgatagtgcagctttgaaacactctttttgtagaaactgcaagtggatgtttggtcctctctgaggatttcgttggaaacgggataaaccgcacagaactaaaacagaagcattgtcagaaacttctttgtgatgattgcattcaattcacagagttgaaggttccttttcaaacagcagtttccaatcactctttctgtggaatctgcaagtggatatttgggcctctctgaggatttcgttggaaacgggataaaacgcacagaactaaaacagaagcattctcagaaacttctctgtgatgtttgtgttcaactcccagagtttcacgttgcttttcatagaggagttctgaaacatgcttttcgtagtgtctgcaagtggacatttggagcgctttcaggcctgtgttggaaaacgaattatggtcacataaaaactggagagaagccttctcagaaacttctctgtgatgattgcattcaactcacagagttgaaccctcctatggatagagcagtgttgaaactctctttttgtggaatctgcaagtggatatgtggacctctccgaagatgtctttggaaacgggaatatcttcacataaaaactaaacagaagcattctcagaaacttcttggtgatgtttgcattcaaatcccagagttgaaccttcctttgatagttcaggtttgaaacactctttttgtaggatctgcaagtggatatttggaccactctgtggccttcgttcgaaacgggtacatcttcgcataaaatctagacagaagcattctcagaaaatactttgtgatgattgagttgaactcacagagctgaacattcctttggatggagcaggtttgagacacactttttgtagaatctacaagtggatatttggacctctctgaggatttcgttggaaacgggataactgcacctaactaaacggaagcattcccagaaactgctttgtgatgattgcattcacctcacagagttgaacattcctattgatagagcagtttggaaacactcttgttgtggaatgtgcaagtggagatttggaacgctttgaggcctatggtagtaaagggaatagcttcatagaaaaactagacagatgcattctcaggaactttttggtgatgtttgtattcaactcccagagttgaactttcctttggaaagagcagctatgaaacactctttttctagaatctgcaagtggacgtttggagggctttgtggttttgtggtggaaaaggaaatatcttcacctaaatactagatagaagcattctcagaagcttctctgtgatgactgcattcaactcacggagttgaacactccttttgagagcacagttttgaaactctctttctgtggcatctgcaaggggacatgtagacctctttgaagatttcgttggaaacggaatcatcttcacataaaatctatacagaagcagtctcagaatcttctttgtgatgtttgcattcaaatcccagagttgaactttcctttcaaagttcacgtttgaaacactctttttgcaggatctacaagtggatatttggaccactctgtgtccttcgttcgaaacgggtatatcttcacatgacatctagacagaagctttctcagaaaattctttgggatgattgagtggaactcacagagctgaacattccttgcgatgtagcagtttagaaacacactttctgcagaatctgcaagtgcatatttggacctctctgaggaattcgttggaaacgggataatttcagctgactaaacagaagcattctcagaaccttcttcgtgatgtctgcattcaactcacagtgtggaacctttctttgatagttcaggtttgaaacactctttttgtagaaactgcaaggggataattgcacttctttgaggcctaccgtcgtaaaggaaataacttcctatagaaagaagacagaagcattctcagaaccctcttcgtgatgtttgcattcaactcacagtgctgaacctttctttgatagttcagctttgaaacactcttcttgtagaaactgcaagtggatatttggtcctctctgaggatttcgttggaaacgggataaaccgcacagaactaaacagaagaattctcagagccctcttcgtgatgtttgcattcaactcacagtgctgaaccttttttgatagtgcagctttgaaacactctttttgtagaaactgcaagtggatatttggtcctctctgaggatttcgttggaaacgggataaactgcacagaactaaaacagaaaagcattgtcagaaacttctttgtgatgattgcattcaactcacagagttgaaggttccttttcaaacagcagtttccaatcactctttctgtggaatctgcaagtggatatttgggcctctctgaggatttcgttggaaacgggataaaacgcacagaactaaaacagaagcattctcagaaacttctctgtgatgtttgtgttcaactcccagagtttcacgttgcttttcatagagtagttctgaaacatgcttttcgtagtgtctgcaagtggacatttggagcgctttcaggcctgtggtggaaaacgaattatggtcacataaaaactggagagaagccttctcagaaacttctctgtgatgattgcattcaactcacagagttgaaccctcctatggatagagcagtgttgaaactctctttttgtggaatctgcaagtggatatgtggacctctccgaagatgtctttggaaacgggaatatcttcacataaaaactaaacagaagcattctcagaaacttcttggtgatgtttgcattcaaatcccagagttgaaccttcctttgatagttcaggtttgaaacactctttctgtaggatctgcaagtggctatttggaccactctgtggccttcgttcgaaacgggtatatcttcgcataaaatctagacagaagcattctcagaaaatactttgtgatgattgagtttaaatcacagagctgaccattcctttggatggagcaggtttgagacacactttttgtagaatctacaagtggatatttggacctctctgaggatttcgttggaaacgggataactgcacctaactaaacggaagcattctcagaaactgctttgtgatgattgcattcacctcacagagttgaacattcctattgatagagcagtttggaaacactcttgttgtggaatgtgcaagtggagatttggagcgctttgaggcctatggtagtaaagggaatagcttcatagaaaaactagacagatgcattctcaggaactttttggtgatgtttgtattcaactcccagagttgaactttcctttggaaagagcagctatgaaacactctttttctagaatctgcaagtggacgtttggagggctttgtggtttgtggtggaaaaggaaatatcttcacctaaatactagacagaagcattctcagaagcttctctgtgatgactgcattcaactcacggagttgaacactccttttgagagcgcagttttgaaactctctttctgtggcatctgcaaggggacatgtagacctctttgaagatttcgttggaaacggaatcatcttcacataaaaactatacagaagcagtctcagaatcttctttgtgatgtttgcattcaaatcccagagttgaactttcctttcaaagttcacgtttgaaacactctctttgcaggatctacaagtggatatttggaccactctgtgtccttcgttcgaaacgggtatatcttcacatgacatctagacagaagctttctcagaaaattctttgggatgattgagttgaactcacagagctgagcattccttgcgatgtagcagtttagaaacacactttctgcagaatctgcaagtgcatatttggacctctgtgaggaattcgttggaaacgggataatttcagctgactaaacagaagcattctcagaaccttcttcgtgatgtctgcattcaactcacagtgtggaacctttctttgatagttcaggtttgaaacactctttttgtagaaactgcaaggggataattgcactctttgaggagtaccgtagtaaaggaaataacttcctataaaaagaagacagaagcattctcagaaccctcttcgtgatgtttgcattcaactcacagtgctgaacctttctttgatagttcagctttgaaacactctttttgtagaaactgcaagtggatatttggtcctctctgaggatttcgttggaaacgggataaactgcacagaactaaacagaagcattctcagaaccttcttcgtgatgtttgcattcaactcacagtgttgaacctttctttgatagttcaggtttgaaacggtctttctgtagaaactgcaagtagatatttggacctctctgaggatttcgttggaaacgggataacccgcacagaactaaaacagaagcattcacagaaaactcttggtgacgactgagtttaactcacagagctgaacattcctttggatggatcagtttcgaaacacactatttgtagaatgtgcaagtggatatttgggcctctctgaggatttcgttggaaacgggataaaccgcacagaactaaacagaagcattctcagaaactactttgtgatgattgcattcaagtcacagagttgaacattccctttgacagagcagtttggaaactctctttgtgtagaatctgcaagtggagatatggaccgctttgaggcctatggtagtaaaggaaatagcttcatataaaagctagacagtagcattctcagaaacttctttgtgatgcttgcattcaactcacagagttgaactttcctttcgagagagaagctttgaaacactctttttccggaatctgcaagtggacatttggagggctttgaggcctgtggtggaaaaggaattatcttcccgtaaaagctagatagaagcattgtcagaaacttctttgtgatgattgcattcaactcacagagttgaaggttccttttcaaacagcagtttccaatcactctttctgtggaatctgcaagtggatatttggacctattttgaagatttccttggaaacgggataatcttcacagaaaagctaaacagaagcattctcagaaacttctctgtgatgtttgtgttcaactcccagagtttcacattgcttttcatagagtagttctgaaacatgcttttcgtagtgtctgcaagtggacatttggagcgctttcaggcctgtggtggaaaacgaattatggtcacataaaaactggagagaagccttctcagaaacttctctgtgatgattgcattcaactcactgagttgaaccctcctatggatagagcagtgttgaaactctctttttgtggaatctgcaagtggatatgtggacctctccgaagatgtctttggaaacgggaatatcttcacataaaaactaaacagaagcattctcagaaacttcttggtgatgtttgcattcaaatcccagagttgaaccttcctttgatagttcaggtttgaaacactctttttgtaggatctgcaagtggatatttggaccactctgtggccttcgttcgaaacgggtacatcttcgcataaaatctagacagaagcattctcagaaaatactttgtgatgattgagtttaactcacagagctgaacattcctttggatggagcaggtttgagacacactttttgtagaatctacaagtggatatttggacctctgtgaggatttcgttggaaacgggataactgcacctaactaaacggaagcattctcagaaactgctttgtgatgattgcattcacctcacagagttgaacattcctattgatagagcagtttggaaacactcttgttgtggaatgtgcaagtggagatttggagcgctttgaggcctatggtagtaaagggaatagcttcatagaaaaactagacagatgcattctcaggaactttttggtgatgtttgtattcaactcccagagttgaactttcctttggaaagagcagctatgaaacactctttttctagaatctgcaagcggacgtttggagggctttgtggtttgtggtggaaaaggaaatatcttcacctaaatactagacagaagcattctcagaagcttctctgtgatgactgcattcaactcacggagttgaacactccttttgagagcgcagttttgaaactctctttctgtggcatctgcaaggggacatgtagacctctttgaagatttcgttggaaacggaatcatcttctcataaaaactatacagaagcagtctcagaatcttctttgtgatgtttgcattcaaatcccagagttgaactttcctttcaaagttcacgtttgaaacactctttttgccggatctacaagtggatatttggaccactctgtgtccttcgttcgaaacgggtatatcttcacacgacatctagacagaagctttctcagaaaattctttgggatgattgagtggaactcacagagctgaacattccttgcgatgtagcagtttagaaacacactttctgcagaatctgcaagtgcatatgtggacctctctgaggaattcgttggaaacgggataatttcagctgactaaacagaagcattctcagaaccttcttcgtgatgtctgcattcaactcacagtgtggaacctttctttgatagttcaggtttgaaacactctttttgtagaaactgcaaggggataattgcacttctttgaggcctacggtcgtaaaggaaataacttcctatagaaagaagacagaagcattctcagaaccctcttcgtgatgtttgcattcaactcacagtgctgaacctttctttgatagttcagctttgaaacactcttcttgtagaaactgcaagtggatatttggtcctctctgaggatttcgttggaaacgggataaaccgcacagaactaaacagaagcattctcagagccctcttcgtgatgtttgcattcaactcacagtgctgaacctttctttgatagtgcagctttgaaacactctttttgtagaaactgcaagtggatatttggtcctctctgaggatttcgttggaaacgggataaaccgcacagaactaaaacagaagcattcacagaaaactcttggtgacgactgagtttaactcacagagctgaacattcctttggatggagcagtttcgaaacacactatttgtagaatctgcaagtggatatttgggcctctctgaggatttcgttggaaacgggataaaccgcacagaactaaaacagaagcattctcagaaactactttgtgatgattgcattcaagtcacagagttgaacattccctttgacagagcagtttggaaactctctttgtgtagaatctgcaagtggagatatggaccgctttgaggcctatggtagtaaaggaaatagcttcatataaaagctagacagtagcattctcagaaacttctttgtgatgcttgcattcaactcacagagttgaactttcctttcgagagagaagctttgaaacactctttttccagaatctgcaagtggacatttggagggatttgaggcctgtggtggaaaaggaattaacttcccgtaaaagctagatagaagcattgtcagaaacttctttgtgatgattgcattcaactcacagagatgaaggttcctttacaaacagcagtttccaaacactctttctgtggaatctgcaagtggatatttggacctctttgaagatttcgttggaaacgggagaatcttcacagaaaagctaaacagaagcattctcagaaacttctctgtgatgtttgtgttcaactcccagagtttcacattgcttttcatagagtagttctgaaacatgcttttcgtagtgtctgcaagtggacatttggagcgctttcaggcctgtggtggaaaacgaattatggtcccataaaaactggagagaagccttctcagaaacttctctgtgatgattgcattcaactcacagatttgaaccctcctatggatagagcattgttgaaactctctttttgtggaatctgcaagtggatatgtggacctctccgaagatgtctttggaaacgggaatatcttcacataaaaactaaacagaagcattctcagaaacttcttggtgatgtttgcattcaaatcccagagttgaaccttcctttgagagttcaggtttgaaacactctttttgtaggatctgcaagtggatatttggaccactctgtggccttcgttcgaaacgggtacatcttcgcataaaatctagacagaagcattctcagaaaatactttgtgatgattgagttgaactcacagagctgaacattcctttggatggagcaggtttgagacacactttttgtagaatctacaagtggatatttggacctctctgaggatttcgttggaaacgggataaatacacctaactaaacgtaagcattctcagaaactgctttgtaatgattgcattcacctcacagagttgaacattcctattgatagagcagtttggaaacactcttgttgtggaatgtgcaagtggagatttggagcgctttgaggcctatggtagtaaagggaatagcttcatagaaaaactagacagatgcattctcaggaactttttggtgatgtttgtattcaactcccagagttgaactttcctttggaaagagcagctatgaaacactctttttctagaatctgcaagtggacgtttggaaggctttgtggtttgtggtggaaaaggaaatatcttcacctaaatactagatagaagcattctcagaagcttctctgtgatgactgcattcaactcacggagttgaacactccttttgagagcgcagttttgaaactctctttctgtggcatctgcaaggggacatgtagacctctttgaagatttcgttggaaacggaatcatcttcacatcaaaactatacagaagcagtctcagaatcttctttgtgatgtttgcattcaaatcccagagttgaactttcctttcaaagttcacgtttgaaacactctttttgcaggatctacaagtggatatttggaccactctgtgtccttcgttcgaaacgggtatatcttcacatgacatctagacagaagctttcccagaaaattctttgggatgattgagtggaactcacagagctgaacattccttgcaatgtagcagtttagaaacacactttctgcagaatctgcaagtgcatatttggacctctctgaggaattcgttggaaacgggataatttcagctgactaaacagaagcattctcagaacttcttcgtgatgtctgcattcaactcacagtgtggaacctttctttgatagttcaggtttgaaacactctttttgtagaaactgcaaggggataattgcacttctttgaggcctaccgtagtaaaggaaataacttcctatagaaagaagacagaagcattctcagaaccctcttcgtgatgtttgcattcaactcacagtgctgaacctttctttgatagttcagctttgaaacactcttcttgtagaaactgcaagtggatatttggtcctctctgaggatttcgttggaaacgggataaaccgcacagaactaaacagaagaattctcagagccctcttcgtgatgtttgcattcaactcacagtgctgaacctttctttgatagtgcagctttgaaacactctttttgtagaaactgcaagtggatgtttggtcctctctgaggatttcgttggaaacgggataaaccgcacagaactaaaacagaagcattgtcagaaacttctttgtgatgattgcattcaactcacagagttgaaggttccttttcaaacagcagtttccaatcactctttctgtggaatctgcaagtcgatatttgggcctctctgaggatttcgttggaaacgggataaaacgcacagaactaaaacagaagcattctcagaaacttctctgtgatgtttgtgttcaactcccagagtttcacgttgcttttcatagagtagttctgaaacatgcttttcgtagtgtctgcaagtggacatttggagcgctttcaggcctgtggtggaaaacgaattatggtcacataaaaactggagagaagccttctcagaaacttctctgcgatgattgcattcaactcacagagttgaaccctcctatggatagagcagtgttgaaactctctttttgtggaatctgcaagtggatatgtggacctctccgaagatgtctttggaaacgggaatatcttcacatagaaactaaacagaagcattctcagaaacttcttggtgatgtttgcattcaaatcccagagttgaaccttcctttgatagttcaggtttgaaacactctttttgtaggatctgcaagtggatatttggaccactctgtggccttcgttcgaaacgggtacatcttcgcataaaatctagacagaagcattctcagaaaatactttgtgatgattgagtttaactcacagagctgaacattcctttggatggagcagacttgagacacactttttgtagaatccacaagtggatatttggacctctctgaggatttcgttggaaacgggataactgcaccgaactaaacggaagcattctcagaaactgctttgtgatgattgcattcacctcacagagttgaccattcctattgatagagcagtttggaaacactcttgttgtggaatgtgcaagtggagatttggagcgctttgaggcctatggtagtaaagggaatagcttcatagaaaaactagacagatgcattctcaggaactttttggtgatgtttgtattcaactcccagagttgaactttcctttggaaagagcagctatgaaacactctttttctagaatctgcaagtggacgtttggagggctttgtggtttgtggtggaaaaggaaatatcttcacctcaatactagatagaagcatactcagaagcttctctgtgatgactgcattcaactcacggagttgaacactccttttgagagcgcagttttgaaactctgtttctgtggtatctgcaaggggacatgtagacctctttgaagatttcgttggaaacggaatcatcttcacatcaaaactatacagaagcagtctcagaatcttctttgtgatgtttgcattcaaatcccagagttgaactttcctttcaaagttcacgtttgaaacactctttttgcaggatctacaagtggatatttggaccactctgtgtccttcgttcgaaacgggtatatcttcacaggacatctagacagaagctttctcagaaaattctttgggatgattgagtggaactcacagagctgaacattccttgcgatgtagcagtttagaaacacactttctgcagaatctgcaagtgcatatttggacctctctgaggaattcgttggaaacgggataatttcagctgactaaacagaagcattctcagaaccttcttcgtgatgtctgcattcaactcacagtgtggaacctttctttgatagttcaggtttgaaacactctttttgtagaaactgcaaggggataattgcacttctttgaggcctaccgtagtaaaggaaataacttcctatagaaagaagacagaagcattctcagaaccctcttcgtgatgtttgcattcaactcacagtgctgaacctttctttgatagttcagctttgaaacactcttcttgtagaaactgcaagtggatatttggtcctctctgaggatttcgttggaaacgggataaaccgcacagaagtaaacagaagcattctcagaaccttcttcgtgatgtttgcattcaactcacagtgttgaacctttctttgatagttcaggttggaaacggtctttctgtagaaactgcaagtagatatttggacctctctgaggatttcgttggaaacgggataaaccgcacagaactaaaacagaagcattcacagaaaactcttggtgacgactgagtttaactcacagagctgaacattcctttggatggagcagtttcaaaacacactatttgtagaatgtgcaagtggatatttgggcctctctgaggatttcattggaaacgggataaaccgcacagaactaaacagaagcattctcagaaactactttgtgatgattgcattcaagtcacagagttgaacattccctttgacagagcagtttggaaactctctttgtgtagaatctgcaagtggagatatggaccgctttgaggcctatggtagtaaaggaaatagcttcatataaaagctagacagtagcattctcagaaacttctttgtgatgcttgcattcaactcacagagttgaactttcctttcgagagagaagctttgaaacactctttttccagaatgtgcaagtggacatttggagggctttgaggcctgtggtggaaaaggaattatcttcccgtaaaagctagatagaagcattgtcagaaacttctttgtgatgattgcattcaactcacagagttgaaggttccttttcaaacagcagtttccaatcactctttctgtggaatctgcaagtggatatttgggcctctctgaggatttcgttggaaacgggataaaacgcacagaactaaaacagaagcattctcagaaacttcttggtgatgtttgcattcaaatcccagagttgaaccttcctttgatagttcaggtttgaaacactctttctgtaggatctgcaagtggctatttggaccactctgtggccttcgttcgaaacgggtatatcttcgcataaaatctagacagaagcattctcagaaaatactttgtgatgattgagtttaaatcacagagctgaccattcctttggatggagcaggtttgagacacactttttgtagaatctacaagtggatatttggacctctctgaggatttcgttggaaacgggataactgcacctaactaaacggaagcattctcagaaactggtttgtgatgattgcattcacctcacagagttgaacattcctattgatagagcagtttggaaacactcctgttgtggaatgtgcaagtggagatttggagcgctttgaggcctatggtagtaaagggaatagcttcatagaaaaactagacagatgcattctcaggaactttttggtgatgtttgtattcaactcccagagttgaactttcctttggaaacagcagctatgaaacactctttttctagaatctgcaagtggacgtttggagggctttgtggtttgtggtggaaaaggaaatatcttcacctaaatactagatagaagcattctcagaagcttctctgtgatgactgcattcaactcacggagttgaacactccttttgagagcgcagttttgaaactctctttctgtggcatctgcaaggggacatgtagacctctttgaagatttcgttggaaacggaatcatcttcacataaaaactatacagaagcagtctcagaatcttctttgtgatgtttgcattcaaatccccgagttgaactttcctttcaaagttcacgtttgaaacactctttttgcaggatctacaagtggatatttggaccactctgtgtccttcgttcgaaacgggtatatcttcacatgacatctagacagaagctttctcagaaaattctttgggatgattgagttgaactcacagagctgagtattccttgcgatgtagcagtttagaaacacactttctgcagaatctgcaagtgcatatttggacctctctgaggaattcgttggaaacaggataatttcagctgactaaacagaagcattctcagaaccttcttcgtgatgtctgcattcaactcaaagtgtggaaccattctttgatagttcaggatttaaaaactcttttcgtagaaactgcaaggggataattgcactctttgagggtaccgtagtaaaggaaataacttcctataaaaagaagacagaagcattctcagaaccctcttcgtgatgtttgcattcaactcacagtgctgaacctttctttgatagttcagctttgaaacactcttcttgtagaaactgcaagtggatatttggtcctctctgaggatttcgttggaaacgggataaaccgcacagaactaaacagaagaattctcagagccctcttcgtgatgtttgcattcaactcacagtgctgaacctttctttgatagtgcagctttgaaacactctttttgtagaaactgcaagtggatgtttggtcctctctgaggatttcgttggaaacgggataaaccgcacagaaccaaaacagaagcattgtcagaaacttctttgtgatgattgcattcaactcacagagttgaaggttccttttcaaacagcagtttccaatcactctttctgtggaatctgcaagtggatatttgggcctctctgaggatttcgttggaaacgggataaaacgcacagaactaaaacagaagcattctcagaaacttctctgtgatgtttgtgttcaactcccagagtttcaccgttgcttttcatagagtagttctgaaacatgcttttcgtagtgtctgcaagtggacatttggagcgctttcaggcctgtggtggaaaacgaattatggtcacataaaaactggagagaagccttctcagaaacttctctgtgatgattgcattcaactcacagagttgaaccctccctatggatagagcagtgttgaaactctctttttgtggaatctgcaagtggatatgtggacctctccgaagatgtctttggaaacgggaatatcttcacataaaaactaaacagaagcattctcagaaacttcttggtgatgtttgcattcaaatcccagagttgaaccttcctttgatagttcaggtttgaaacactctttttgtaggatctgcaagtggctatttggaccactctgtggccttcgttcgaaacgggtatatcttcgcataaaatctagacagaagcattctcagaaaatactttgtgatgattgagtttaactcacagagctgaacattcctttggatggagcaggtttgagacacaccttttgtagaatctacaagtggatatttggacctctctgaggatttcgttggaaacgggataactgcacctaactaaacggaagcattctcagaaactgctttgtgatgattgcattcacctcacagagttgaacattcctattgatagagcagtttggaaacactcttgttgtggaatgtgcaagtggagatttggagcgctttgaggcctatggtagtaaagggaatagcttcatagaaaaactagacagatgcattctcaggaactttttggtgatgtttgtattcaactcccagagttgaactttcctttggaaagagcagctatgaaacactgtttttctagaatctgcaagtggacgtttggagggctttgtggtttgtggtggaaaaggaaatatcttcacctaaatactagatagaagcatcctcagaagcttctctgtgatgactgcattcaactcacggagttgaacactccttttgagagcgcagttttgaaactctctttctgtggcatctgcaaggggacatgtagacctctttgaagatttcgttggaaacggaatcatcttcacataaaaactacacagaagcagtctcagaatcttctttgtgatgtttgcattcaaatccccgagttgaactttcctttcaaagttcacgtttgaaacactctttttgcaggatctacaagtggatatttggaccactctgtgtccttcgttcgaaacgggtatatcttcacatgacatctagacagaagctttctcagaaaattctttgggatgattgagttgaactcacagagctgagcattccttgcgatgtagcagtttagaaacacactttctgcagaatctgcaagtgcatatttggacctctgtgaggaattcgttggaaacgggataatttcagctgactaaacagaagcattctcagaaccttcttcgtgatgtctgcattcaactcacagtgtggaacctttctttgatagttcaggtttgaaacactctttttgtagaaactgcaaggggataattgcactctttgaggagtaccgtagtaaaggaaataacttcctataaaaagaagacagaagcattctcagaaccctcttcgtgatgtttgcattcaactcacagtgctgaacctttctttgatagttcagctttgaaacactctttttgtagaaactgcaagtggatatttggtcctctctgagcatttcgttggaaacgggataaactgcacagaactaaacagaagcattctcagaaccttcttcgtgatgtttgcattcaactcacagtgttgaacctttctttgatagttcaggtttgaaacggtctttctgtagaaactgcaagtagatatttggacctctctgaggatttcgttggaaacgggataacccgcacagaactaaaacagaagcattcacagaaaactcttggtgacgactgagtttaactcacagagctgaacattcctttggatggagcagtttcgaaacacactatttgtagaatgtgcaagtggatatttaggcctctctgaggatttcgttggaaacgggataaaccgcacagaactaaacagaagcattctcagaaactactttgtgatgattgcattcaagtcacagagttgaacattccctttgacagagcagtttggaaactctctttgtgtagaatctgcaagtggagatatggaccgctttgaggcctatggtagtaaaggaaatagcttcatataaaagctagacagtagcattctcagaaacttctttgtgatgcttgcattcaactcacagagttgaactttcctttcgagagagaagctttgaaacactctttttccagaatctgcaagtggacatttggagggctttgaggcctgtggtggaaaaggaattaacttcccgtaaaagctagatagaagcattgtcagaaacttctttgtgatgattgcattcaactcacagagttgaaggttccttttcaaagagcagtttccaatcactctttctgtggaatctgcaagtggatatttggacctctttgaagatttcgttggaaacgggagaatcttcacagaaaagctaaacagaagcattctcagaaacttctctgtgatgtttgtgttcaactcccagagtttcacattgcttctcatagagtagttctgaaacatgcttttcgtagtgtctgcaagtggacatttggagcgctttcaggcctgtggtggaaaacgaattatggtcacataaaaactggagagaagcattgtcagaaacttctttgtgatgattgcattcaactcacagggttgaaggttccttttcaaagagcagtttccaatcactctttctgtggaatctgcaagtggatatttggacctctttgaagatttcgttggaaacgggagaatcttcacagaaaagctaaacagaagcattctcagaaacttctgtgtgatgtttgtgttcaactcccagagtttcacattgcttttcatagagtagttctgaaacatgcttttcgtagtgtctacaagtggacatttggagcgctttcaggcctgtggtggaaaacgaattatggtcacataaaaactggagagaagccttctcagaaacttctctgtgatgattgcattcaactcacagagttgaaccctcctatggatagagcagtgttgaaactctctttttgtggaatctgcaagtggatatgtggacctctccgaagatgtctttggaaacgggaatatcttcacataaaaactaaacagaagcattctcagaaacttcttggtgatgtttgcattcaaatcccagagttgaaccttcctttgatagttcaggtttgaaacactctttttgtaggatctgcaagtggctatttggaccactctgtggccttcgttcgaaacgggtatatcttcacataaagtctagacagaagcattctcagaaaatactttgtgatgattgagtttaaatcacagagctgaacattcctttggatggagcaggtttgagacacactttttgtagaatctacaagtggatatttggacctctctgaggatttcgttggaaacgggataactgcacctaactaaacggaagcattctcagaaactgctttgtgatgattgcattcacctcacagagttgaacattcctattgatagagcagtttggaaacactcttgttgtggaatgtgcaagtggagatttggagcgctttgaggtctatggtagtaaagggaatagcttcatagaaaaactagacagatgcattctcaggaactttttggtgatgtttgtattcaactcccagagttgaactttcctttggaaagagcagctatgaaacactctttttctagaatctgcaagtggacgtttggagggctttgtggtttgtggtggaaaaggaaatatcttcacctaaatactagatagaagcattctcagaagcttctctgtgatgactgcattcaactcacggagttgaacactccttttgagagcgtagttttgaaactctctttctgtggcatctgcaaggggacatgtagacctctttgaagatttcgttggaaacggaatcatcttcacataaaaactatacagaagcagtctcagaatcttctttgtgatgtttgcattcaaatcccagagttgaactttcctttcaaagttcacgtttgaaacactctttttgcaggatctacaagtggatatttggaccactctgtgtccttcgttcgaaacgggtatatcttcacacgacatctagacagaagctttctcagaaaattctttgggatgattgagttgagcaaacagagctgaacactccttgtgatgtagcagtttagaaacacactttctgcagaatctgcaagtacatatgtggacctctctgaggaattcattagaaacgggataatttcagctgactaaacagaagcattctcagaaccttcttcgggatgtctgcattcaactcacagtgtggaacctttctttgatagttcaggtttgaaacactctttttgtagtaactgcaaggggataattgcacttccttgaggcctaccgtagtaaaggaaataacttcctataaaaagaagacagaagcattcgcagaaccctcttcgtgatgtttgcattcaactcacggtgctgaacctttctttgatagttcagctttgaaacactctttttgtagaaactgcaagtggatatttggtcctctctgaggatttcgttggaaacgggataaaccgcacagaactaaacagaagcattctcaaaaccttcttcgtgatgtttgcattcaactcacagtgttgaacctttctttgatagttcaggtttgaaacggtctttctgtagaaactgcaagtagatatttggacctctctgaggatttcgttggaaacgggataaacagcacagaactaaaacagaagcattcacagaaaactcttggtgacgactgagtttaacacacagagctgaacattcctttggatggagcagtttcgaaacacactatttgtagaatgtgcaagtggatattggggcctctctgaggatttcgttggaaacgggataaacctcacagaactaaactgaagcattctcagaaactactttgtgatgattgcattcaagtcacagagttgaacattccctttgacagagcagtttggaaactgtctttgtgtagaatctgcaagtggagatatggaccgctttgaggcctatggtagtaaaggaaatagcttcatataaaagctagacagtagcattctcagaaacttctttctgatgcttgcattcaactcacagagttgaactttccttttgagagagaagctttgaaacactctttttccagaatctgcaagtggacatttggagggctttgaggcctgtggtggaaaaggaattatcttcccgtaaaagctagatagaagcattgtcagaaacttctttgtgatgattgcattcaactcacagtgttgaaggttccttttcaaacagcagtttccaatcactctttctgtggaatctgcaagtggatatttggacctctttgaagatttcgttggaaacgggagaatcttcacagaaaagctaaacagaagcattctcagaaacttctctgtgatgtttgtgttcaactcccagagtttcacattgcttttcatagagtagttctgaaacatgcttttcgtagtgtctgcaagtggacatttggagcgctttcaggcctttggtggaaaacgaattatggtcacataaaaactggagagaagccttctcagaaacttctctgtgatgattgcattcaactcacagagttgaaccctcctatggatagagcagtgttgaaactctctttttgtggaatctgcaagtggatatgtggacctctccgaagatgtctttggaaacgggaatatcttcacataaaaactaaacagaagcattctcagaaacttcttggtgatgtttgcattcaaatcccagagttgaaccttcctttgatagttcaggtttgaaacactctttttgtaggatctgcaagtggatatttggaccactctgtggccttcgttcgaaacgggtatatcttcgcataaaatctagacagaagcattctcaggaaaatactttgtgatgattgagtttaaatcacagagctgaacattcctttggatggagcaggtttgagacacactttttgtagaatctacaagtggatatttgcacctctctgaggatttcattggaaacgggataactgcacctaactaaacggaagcattctcagaaactgctttgtgatgattgcattcacctcacagagttgaacattcctattgatagagcagtttggaaacactcttgttgtggaatgtgcaagtggagatttggagcgctttgaggcctatggtagtaaagggaatagcttcatagaaaaactagacagatgcattgtcaggaactttttggtgacgtttgtattcaactcccagagttgaactttcctttggaaagagcagctatgaaacactctttttctagaatctgcaagtggacgtttggagggcttcgtggtttgtggtggaaaaggaaatatcttcacctaaatactagatagaagcattctcagaagcttctctgtgatgactgcattcaactcacggagttgaacagtccttttgagagcgcagttttgaaacattctttctgtggcatctgcaaggggacacgtagacctcttggaagatttcgttggaaacggaatcatcttcacataaaaactatacagaagcattctcagaaacttcttggtgatgtttgcattcaaatcccagagttgaaccttcctttgatagttcaggtttgaaacactctttttgcaggatctacaagtggatatttggaccactctgtgcccttcgttcgaaacggatatatcttcacatgacatctagccagaagcattctcagaaaatactttgtgatgattgagttgaactcacagagctgaacattcctttggatggagcaggtttgagacacactttttgtagaatctacaagtggatatttggacctctctgaggatttcgttggaaacgggataactgcacctaactaaacggaagcattctcagaaactgctttgtgatgattgcattcacctcacagagttgaacattcctattgatagagcagtttggaaacactcttgttgtggaatgtgcaagtggagatttggagcgctttgaggcctatggtagtaaagggaatagcttcatagaaaaactagacagatgcattctcaggaactttttggtgatgtttgtattcaactcccagagttgaactttcctttggaaagagcagctatgaaacactctttttctagaatctgcaagtggacgtttggagggctttgtggtttgtggtggaaaaggaaatatcttcacctaaatactagagagaagcattctcagaagcttctctgtgatgactgcattcaactcacggagttgaacactccttttgagagcgcagttttgaaactctctttctgtggcatctgcaaggggacatgtagacctctttgaagatttcgttggaaacggaatcatcttcacatcaaaactatacagaagcagtctcagaatcttctttgtgatgtttgcattcaaatcccagagttgaactttcctttcaaagttcatgtttgaaacactctttttgcaggatctacaagtggatatttggaccactctgtgtccttcgttcgaaacgggtatatcttcacatgacatctagacagaagctttctcagaaaattctttgggatgattgagttgagcaaacagagctgaacactccttgcgatgtagcagtttagaaacacactttctgcagaatctgcaagtgcatatgtggacctctctgaggaattcgttggaaacgggataatttcagctgactaaacagaagcattctcagaaccttcttcgtgatgtctgcattcaactcacagtgtggaacctttctttgatagttcaggtttgaaacactctttttgtagaaactgcaaggggatcattgcacttctttgaggcctaccgtagtaaaggagataacttcctataaaaagaagacagaagcattctcagaaccctcttcgtgatgtttgcattcaactcacagtgctgaacctttctttgatagttcagctttgaaacactctttttgtagaaactgcaaatggatatttggtcctctctgaggatttcgttggaaaagggataaaacgcccagaactaaacagaagcattcacagaaaactcttggtgacgactgagtttaactcacagagctgaacattcctttggatggagcagtttcaaaacacactatttgtagaatctgcaagtggatatatgggcctctctgaggatttcgttggaaacgggataaaccgcacagaactaaaacagaagcattctcagaaactactttgtgatgattgcattcaagtcacagagttgaacattccctttgacagagcagtttggaaactctctttgtgtagaatctgcaagtggagatatggaccgctttgaggcctatggtagtaaaggaaatagcttcatataaaagctagacagtagcattctcagaaactactttgtgatgcttgcattcaactcacagagttgaactttcctttcgagagagaagctttgaaacactctttttccagaatgtgcaagtggacatttggggagctttgaggcctgtggtggaaaaggaattatcttcccgtaaaagctagatagagcattgtcagaaacttctttgtgatgattgcattcaactcacagagttgaaggttccttttcaaacagcagtttccaatcactctttctgtggaatctgcaagtggatatttcgacctctttgaagatttcgttggaaacgggagaatcttcacagaaaagctaaacagaagcattctcagaaacttctctgtgatgtttgtgttcaactcccagagtttcacgttgcttttcatagagtagttctgaaacatgcttttcgtagtgtctgcaagtggacatttggagcgctttcaggcctgtggtggaaaacgaattatggtcacataaaaactggagagaaagccttctcagaaacttctctgtgatgattgcattcaactcacagagttgaaccctcctatggatagagcagtgttgaaactctctttttgtggaatctgcaagtggatatgtggacctctccgaagatgtctttggaaacgggaatatcttcacataaaaactaaacagagcattctcagaaacttcttggtgatgtttgcattcaaatcccagagttgaaccttcctttgatagttcaggtttgaaacactctttctgtaggatctgcaagtggctatttggaccactctgtggccttcgttcgaaacgggtatatcttcgcataaaatctagacagaagcattctcagaaaatactttgtgatgattgagtttaaatcacagagctgaccattcctttggatggagcaggtttgagacacactttttgtagaatctacaagtggatatttggacctctctgaggatttcgttggaaacgggataactgcacctaactaaacggaagcattctcagaaactgctttgtgatgattgcattcacctcacagagttgaacattcctattgatagagcagtttggaaacactcttgttgtggaatgtgcaagtggagatttggagcgctttgaggcctatggtagtaaagggaatagcttcatagaaaaactagacagatgcattctcaggaaccttttggtgatgtttgtattcaactcccagaagttgaactttcctttggaaagagcagctatgaaacactctttttctagaatctgcaagtggacgtttggagggctttgtggtttgtggtggaaaaggaaatatcttcacctaaatactagatagaagcattctcagaagcttctctgtgatgactgcattcaactcacggagttgaacactccttttgagagcgcagttttgaaactctctttctgtggcctccgcaaggggacatgtggacctctttgaagatttcgttggaaacggaatcatcttcacataaaaactatacagaagcagtctcagaatcttctttgtgatgtttgcattcaaatcccagagttgaactttcctttcaaagttcacgtttgaaacactctttttgcaggatctacaagtggatatttggaccactctgtgtccttcgttcgaaacgggtatatcttcacacgacatctagacagaagctttctcagaaaattctttgggatgattgagtggaactcacagagctgaacattccttgcgatggagcagtttagaaacacactttctgcagaatctgcaagtgcatatttggacctctctgaggaattcgttggaaacgggataatttcagctgactaaacagaagcattctcagaaccttcttcgtgatgtctgcattcaactcacagtgtggaacctttctttgatagttcaggtttgaaacactctttttgtagaaactgcaaggggataattgcacttctttgaggcctaccgtagtaaaggaaataacttcctatagaaagaagacagaagcattctcagaaccctcttcgtgatgtttgcattcaactcacagtgctgaacctttctttgatagttcagctttgaaacactcttcttgtagaaactgcaggtggatatttggtcctctctgaggatttcgttggaaacgggataaaccgcacagaactaaacagaagaattctcagagccctcttcgtgatgtttgcattcaactcacagtgctgaacctttctttgatagtgcagctttgaaacactctttttgtagaaactgcaagtggatatttggtcctctctgaggatttcgttggaaacgggataaaccgcacagaactaaaacagaagcattcacagaaaactcttggtgacgactgagtttaactcacagagctgaacattcctttggatggagcagtttcgaaacacactatttgtagaatctgcaagtggatatttgggcctctctgaggatttcgttggaaacgggataaaacgcacagaactaaaacagaagcattctcagaaactactttgtgatgattgcattcaagtcacagagttgaacattccctttgacagagcagtttggaaactctctttgtgtagaatctgcaagtggagatatggaccgctttgaggcctatggtagtaaaggaaatagcttcatataaaagctagacagtagcattctcagaaacttctttgtgatgcttgcattcaactcacagagttgaactttcctttcgagagagaagctttgaaacactctttttccagaatgtgcaagtggacatttggggagctttgaggcctgtggtggaaaaggaattatcttcccgtaaaagctagatagaagcattgtcagaaacttctttgtgatgattgcattcaactcacagagttgaaggttccttttcaaacagcagtttccaatcactctttctgtggaatctgcaagtggatatttcgacctctttgaagatttcgttggaaacgggagaatcttcacagaaaagctaaacagaagcattctcagaaacttctctgtgatgtttgtgttcaactcccagagtttcacgttgcttttcatagagtagttctgaaacatgcttttcgtagtgtctgcaagtggacatttggagcgctttcaggcctgtggtggaaaacgaattatggtcacataaaaactggagagaagccttctcagaaacttctctgtgatgattgcattcaactcacagagttgaaccctcctatggatagagcagtgttgaaactctctttttgtggaatctgcaagtggatatgtggacctctccgaagatgtctttggaaacgggaatatcttcacataaaaactaaacagaagcattctcagaaacttcttggtgatgtttgcattcaaatcccagagttgaaccttcctttgatagttcaggtttgaaacactctttctgtaggatctgcaagtggctatttggaccactctgtggccttcgttcgaaacgggtatatcttcgcataaaatctagacagaagcattctcagaaaatactttgtgatgattgagtttaactcacagagctgaacattcctttggatggagcaggtttgagacacactttttgtagaatctacaagtggatatttggacctctctgaggatttcgttggaaacgggataactgcacctaactaaacggaagcattctcagaaactgctttgtgatgattgcattcacctcacagagttgaacattcctattgatagagcagtttggaaacactcttgttgtggaatgtgcaagtggagatttggagcgctttgaggtctatggtagtaaagggaatagcttcatagaaaaactagacagatgcattctcaggaactttttggtgatgtttgtattcaactcccagagttgaactttcctttggaaagagcagctatgaaacactctttttctagaatctgcaagtggacgtttggagggctttgtggtttgtggtggaaaaggaaatatcttcacctaaatactagatagaagcatcctcagaagcttctctgtgatgactgcattcaactcacggagttgaacactccttttgagagcgcagttttgaaactctctttctgtggcatctgcaaggggacatgtagacctctttgaagatttcgttggaaacggaatcatcttcacataaaaactacacagaagcagtctcagaatcttctttgtgatgtttgcattcaaatccccgagttgaactttcctttcaaagttcacgtttgaaacactctttttgcaggatcttcaagtggatatttggaccactctgtgtccttcgttcgaaacgggtatatcttcacatgacatctagacagaagctttctcagaaaattctttgggatgattgagttgaactcacagagctgagcattccttgcgatgtagcagtttagaaacacactttctgcagaatctgcaagtgcatatttggacctctgtgaggaattcgttggaaacgggataatttcagctgactaaacagaagcattctcagaaccttcttcgtgatgtctgcattcaactcacagtgtggaacctttctttgatagttcaggtttgaaacactctttctgtagaaactgcaaggggataattgcactctttgaggagtaccgtagtaaaggaaataacttcctataaaaagaagacagaagcattctcagaaccctcttcgtgatgtttgcattcaactcacagtgctgaacctttctttgatagttcagctttgaaacactctttttgtggaaactgcaagtggatatttggtcctctctgaggatttcgttggaaacgggataaactgcacagaactaaacagaagcattctcagaaccttcttcgtgatgtttgcattcaactcacagtgtggaacctttctttgatagttcaggtttgaaacggtctttctgtagaaactgcaagtagatatttggacctctctgaggatttcgttggaaacgggataacccgcacagaactaaaacagaagcattcacagaaaactcttggtgacgactgagtttaactcacagagctgaacattcctttggatggagcagtttcaaaacacactatttgtagaatgtgcaagtggatatgtgggcctctctgaggatttcgttggaaacgggataaaccgcacagaactaaaacagaagcattctcagaaactactttgtgatgattgcattcaagtcacagagttgaacattccctttgacagagcagtttggaaactctctttgtgtagaatctgcaagtggagatatggaccgctttgaggcctatggtagtaaaggaaatagcttcatataaaagctagacagtagcattctcagaaacttctttgtgatgcttgcattcaactcacagagttgaactttcctttcgagagagaagctttgaaacactctttttccagaatctgcaagtggacatttggagggctttgaggcctgtggtggaaaaggaattatcttcccgtaaaagctagatagaagcattgtcagaaacttctttgtgatgattgcattcaactcacagagttgaaggttccttttcaaacagcagtttccaatcactctttctgtggaatctgcaagtggatatttggacctattttgaagatttcgttggaaacgggataatcttcacagaaaagctaaacagaagcattctcagaaacttctctgtgatgtttgtgttcaactcccagagtttcacgttgcttttcatagagtagttctgaaacatgcttttcgtagtgtctgcaagtggacatttggagcgctttcaggcctgtggtggaaaacgaattatggtcacataaaaactggagagaagccttctcagaaacttctctgtgatgattgcattcaactcacagagttgaaccctcctatggatagagcagtgttgaaactctctttttgtggaatctgcaagtggatatgtggacctctccgaagatgtctttggaaacgggaatatcttcacataaaaactaaacagaagcattctcagaaacttcttggtgatgtttgcattcaaatcccagagttgaaccttcctttgatagttcaggtttgaaacactctttttgtaggatctgcaagtggctatttggaccactctgtggccttcgttcgaaacgggtatatcttcgcataaaatctagacagaagcattctcagaaaatactttgtgatgattgagtttaaatcacagagctgaacattcctttggatggagcaggtttgagacacactttttgtagaatctacaagtggatatttggacctctctgaggatttcgttggaaacgggagaactgcacctaagtaaacggaagcattctcagaaactgctttgtgatgattgcattcacctcacagagttgaacattcctattgatagagcagtttggaaacactcttcttgtggaatgtgcaagtggagatttggagcgctttgaggcctatggtagtaaagggaatagcttcatagaaaaactagacagatgcattctcaggaactttttggtgatgtttgtattcaactcccagagttgaactttcctttggaaagagcagctatgaaacactctttttctagaatctgcaagtggacgtttggagggctttgtggtttgtggtggaaaaggaaatatcttcacctaaatactagaaagaagcattctcagaagcttctctgtgatgactgcattcaactcacggagttgaacactccttttgagagcgcagttttggaactctctttctgtggcatctgcaaggggacatgtagacctctttgaagatttcgttggaaacggaatcatcttcacatcaaaactatacagaagcagtctcagaatcttctttgtgatgtttgcattcaaatcccagagttgaacttgcctttcaaagttcacgtttgaaacactctttttgcaggatctacaagtggatatttggaccactctgtgtccttcgttcgaaacgggtatatcttcacatgacatctagacagaagctttctcagaaaattctttgggatgattgagtggaactcacagagctgtacattccttgcgatgtagcagtttagaaacacactttctgcagaatctgcaagtgcatatttggacctctctgaggaattcgttggaaacgggataatttcagctgactaaacagaagcattctcagaaccttcttcgtgatgtctgcattcaactcacagtgtggaacctttctttgatagttcaggtttgaaacactctttttgtagaaactgcaaggggataattgcacttctttgaggcctaccgtagtaaaggaaataacttcctatagaaagaagacagaagcattctcagaaccctcttcgtgatgtttgcattcaactcacagtgctgaacctttctttgatagttcagctttgaaacactcttcttgtagaaactgcaagtggatatttggtcctctctgaggatttcgttggaaacgagataaaccgcacagaactaaacagaagcattctcagagccctcttcgtgatgtttgcattcaactcacagtgctgaacctttctttgatagtgcagctttgaaacactctttttgtagaaactgcaagtggatatttggtcctctctgaggatttcgttggaaacgggataaactgcacagaactaaaacagaagcattgtcagaaacttctttgtgatgattgcattcaactcacagagttgaaggttccttttcaaacagcagtttccaatcactctttctgtggaatctgcaagtggatatttgggcctctctgaggatttcgttggaaacgggataaaacgcacagaactgaaacagaagcattctcagaaacttctcctgtgatgtttgtgttcaactcccagagtttcacgttgcttttcatagagtagttctgaaacatgcttttcgtagtgtctgcaagtggacatttggagcgctttcaggcctgtggtggaaaacgaattatggtcacataaaaactggagagaagccttctcagaaacttctctgtgatgattgcattcaactcacagagttgaaccctcctatggatagagcagtgttgaaactctctttttgtggaatctgcaagtggatatgtggacctctccgaagatgtctttggaaacgggaatatcttcacataaaaactaaacagaagcattctcagaaacttcttggtgatgtttgcattcaaatcccagagttgaaccttcctttgatagttcaggtttgaaacactctttctgtaggatctgcaagtggctatttggaccactctgtggccttcgttcgaaacgggtatatcttcgcataaaatctagacagaagcattctcagaaaatactttgtgatgattgagtttaaatcacagagctgaccattcctttggatggagcaggtttgagacacactttttgtagaatctacaagtggatatttggacctctctgaggatttcgttggaaacgggaaaactgcacctaactaaacggaagcattctcagaaactgctttgtgatgattgcattcacctcacagagttgaacattcctattgatagagcagtttggaaacactcttgttgtggaatgtgcaagtggagatttggagcgctttgaggcctgtggtagtaaagggaatagcttcatagaaaaactagacagatgcattctcaggaactttttggtgatgtttgtattcaactcccaagagttgaactttcctttggaaagagcagctatgaaacactctttttctagaatctgcaagtggacgtttggagggctttgtggtttgtggtggaaaaggaaatatcttcacctaaatactagatagaagcattctcagaagcttctctgtgatgactgcattcaactcacggagttgaacactccttttgagagcgcagttttgaaactctctttctgtggcatctgcaaggggacatgtagacctctttgaagatttcgttggaaacggaatcatcttcacataaaaactatacagaagcagtctcagaatcttctttgtgatgtttgcattcaaatcccagagttgaactttcctttcaaagttcacgtttgaaacactctttttgcaggatctacaagtggatatttggaccactctgtgtccttcgttcgaaacgggtatatcttcacatgacatctagacagaagctttctcagaaaattctttgggatgattgagtggaactcacagagctgaacattccttgcgatgtagcagtttagaaacacactttctgcagaatctgcaagtgcatatttggacctctctgaggaattcgttggaaacgggataatttcagctgactaaacagaagcattctcagaaccttcttcgtgatgtctgcattcaactcacagtgtggaacctttctttgatagttcaggtttgaaacactctttttgtagaaactgcaaggggataattgcacttcttttgaggcctaccgtagtaaaggaaataacttcctatagaaagaagacagaagcattctcagaaccctcttcgtgatgtttgcattcaactcacagtgctgaacctttctttgatagttcagctttgaaacactcttcttgtagaaactgcaagtggatatttggtcctctctgaggatttcgttggaaacgggataaaccgcacagaactaaacagaagaattctcagagccctcttcgtgatgtttgcattcaactcacagtgctgaacctttctttgatagtgcagctttgaaacactctttttgtagaaactgcaagtggatgtttggtcctctctgaggatttcgttggaaacgggataaaccgcacagaactaaaacagaagcattgtcagaaacttctttgtgatgattgcattcaactcacagagttgaaggttccttttcaaacagcagtttccaatcactctttctgtggaatctgcaagtggatatttgggcctctctgaggatttcgttggaaacgggataaaacgcacagaactaaaacagaaagcattctcagaaacttctctgtgatgtttgtgttcaactcccagagtttcacattgcttttcatagagtagttctgaaacatgcttttcgtagtgtctacaagtggacatttggagcgctttcaggcctgtggtggaaaacgaattatggtcacataaaaactggagagaagccttctcagaaacttctctgtgatgattgcattcaactcacagagttgaaccctcctatggatagagcagtgttgaaactctctttttgtggaatctgcaagtggatatgtggacctctccgaagatgtctttggaaacgggaatatcttcacataaaaactaaacagaagcattctcagaaacttcttggtgatgtttgcattcaaatcccagagttgaaccttcctttgatagttcaggtttgaaacactctttttgtaggatctgcaagtggatatttggaccactctgtggccttcgttcgaaacgggtacatcttcacataaaatctagacagaagcattctcagaaaatactttgtgatgattgagtttaaatcacagagctgaccattcctttggatggagcaggtttgagacacactttttgtagaatctacaagtggatatttggacctctctgaggatttcgttggaaacgggataactgcacctaactaaacggaagcattctcagaaactgctttgtgatgattgcattcacctcacagagttgaacattcctattgatagagcagtttggaaacactcttgttgtggaatgtgcaagtggagatttggagcgctttgaggcctatggtagtaaagggaatagcttcatagaaaaactagacagatgcattctcaggaaccttttggtgatgtttgtattcaactcccagagttgaactttcctttggaaagagcagctatgaaacactctttttctagaatctgcaagtggacgtttggagggctttgtggtttgtggtggaaaaggaaatatcttcacctaaatactagatagaagcattctcagaagcttctctgtgatgactgcattcaactcacggagttgaacactccttttgagagcgcagttttgaaactctctttctgtggcatctgcaaggggacatgtagacctctttgaagatttcgttggaaacggaatcatcttcacataaaaactatacagaagcagtctcagaatcttctttgtgatgtttgcattcaaatccccgagttgaactttcctttcaaagttcacgtttgaaacactctttttgcaggatctacaagtggatatttggaccactctgtgtccttcgttagaaacgggtatatcttcacatgacatctagacagaagctttctcagaaaattctttgggatgattgagttgaactcacagagctgagcattccttgcgatgtagcagtttagaaacacactttctgcagaatctgcaagtgcatatttggacctctgtgaggaattcgttggaaacgggataatttcagctgactaaacagaagcattctcagaaccttcttcgtgatgtctgcattcaacacaaagtgtggaacctttctttgatagttcaggttttaaaaactctttttgtagaaactgcaaggggataattgcactctttgaggagtaccgtagtaaaggaaataacttcctataaaaagaagacagaagcattctcagaaccctcttcgtgatgtttgcattcaactcacagtgctgaacctttctttgatagttcagctttgaaacactctttttgtagaaactgcaagtgaatatttggtcctctctgaggatttcgttggaaacaggataaaacgcacagaactaaacagaagcattctcagaaccttcttcgtgatgtttgcattcaactcacagtgttgaacctttctttgatagttcaggtttgaaacggtctttctgtagaaactgcaagtagatatttggacctctctgaggatttcgttggaaacgggataacccgcacagaactaaaacagaagcattcacagaaaactcttggtgacgactgagtttaactcacagagctgaacattcctttggaaggagcagtttcaaaacacactatttgtagaatgtgcaagtggatatgtgggcctctctgaggatttcgttggaaacgggataaaccgcacagaactaaaacagaagcattctcagaaactactttgttatgattgcattcaagtcacagagttgaacattccctttgacagagcagtttggaaactctctttgtgtagaatctgcaagtggagatatggaccgctttgaggcctatggtagtaaaggaaatagcttcatataaaagctagacagtagcattctcagaaacttctttgtgatgcttgcattcaactcacagagttgaactttcctttcgagagagaagctttgaaacactctttttccagaatctgcaagtggacatttggagggctttgaggcctgtggtggaaaaggaattatcttcccgtaaaagctagatagaagcattgtcagaaacttctttgtgatgattgcattcaagtcacagagttgaaggttccttttcaaagagcagtttccaatcactctttctgtggaatctgcaagtggatatttggacctctttgaagatttcgttggaaacgggagaatcttcacagaaaagctaaacagaagcattctcagaaacttctctgtgatgtttgtgttcaactcccagagtttcacattgcttctcatagagtagttctgaaacatgcttttcgtagtgtctgcaagtggacatttggagcgctttcaggcctgtggtggaaaacgaattatggtcacataaaaactggagagaagccttctcagaaacttctctgtgatgattgcattcaactcacagagttgaaccctcctatggatagagcagtgttgaaactctctttttgtggaatctgcaagcggatatgtggacctctccgaagatgtctttggaaacgggaatatcttcacataaaaactaaacagaagcattctcagaaacttcttggtgatgtttgcattcaaatcccagagttgaaccttcctttgagagttcaggtttgaaacactctttttgtaggatctgcaagtggatatttggaccactctgtggccttcgttcgaaacgggtacatcttcgcataaaatctagacagaagcattctcagaaaatactttgtgatgattgagttgaactcacagagctgaacattcctttggatggagcaggtttgagacacactttttgtagaatctacaagtggatatttggacctctctgaggatttctttggaaacgggataaccttcacagaaaagctaaacagaagcattctcagaaactgctttgtgatgattgcattcacctcacagagttgaacattcctattgatagagcagtttggaaacactcttgttgtggaatgtgcaagtggagatttggagcgctttgaggcctatcgtagtaaagggaatagcttcatagaaaaactagacagatgcattctcaggaactttttggtgatgtttgtattcaactcccagagttgaactttcctttggaaagagcagctatgaaacactctttttctagaatctgcaagtggacgtttggagggctttgtggtttgtggtggaaaaggaaatatcttcacctaaatactagatagaagcattctcagaagcttctctgtgatgactgcattcaactcacggagttgaacactccttttgagagcgcagttttgaaactctctttctgtggcatctgcaaggggacatgtagacctctttgaagatttcgttggaaacggaatcatcttcacataaaaactatacagaagcagtctcagaatcttctttgtgatgtttgcattcaaatcccagagttgaactttcctttcaaagttcacgtttgaaacactctttttgcaggatctacaagtggatatttggaccactctgtgtccttcgttcgaaacgggtatatcttcacatgacatctagacagaagctttctcagaaaattctttgggatgattgagtggaactcacagagctgaacattccttgcgatgtagcagtttagaaacacactttctgcagaatctgcaagtgcatatttggacctctctgaggaattcgttggaaacgggataatttcagctgactaaacagaagcattctcagaacttcttcgtgatgtctgcattcaactcacagtgtggaacctttctttgatagttcaggtttgaaacactctttttgtagaaactgcaaggggataattgcacttctttgaggcctaccgtagtaaaggaaataacttcctatagaaagaagacagaagcattctcagaaccctcttcgtgatgtttgcattcaactcacagtgctgaacctttctttgatagttcagctttgaaacactcttcttgtagaaactgcaagtggatatttggtcctctctgaggatttcgttggaaacgggataaaccgcacagaactaaacagaagaattctcagagccctcttcgtgatgtttgcattcaactcacagtgctgaaactttctttgatagtgcagctttgaaacactctttttgtagaaactgcaagtggatatttggtccactctgaggatttcgttggaaacgggataaaccgcacagaactaaaacagaagcattgtcagaaacttctttgtgatgattgcattcaactcacagagttgaaggttccttttcaaacagcagtttccaatcactctttctgtggaatctgcaagtggatatttgggcctctctgaggatttcgttggaaacgggataaaacgcacagaactaaaacagaagcattctcagaaacttctctgtgatgtttgtgttcaactcccagagtttcacgttgcttttcatagagtagttctgaaacatgcttttcgtagtgtctgcaagtggacatttggagcgctttcaggcctgtggtggaaaacgaattatggtcacataaaaactggagagaagccttctcagaaacttctctgtgatgattgcattcaactcacagagttgaaccctcctatggatagagcagtgttgaaactctctttttgtggaatctgcaagtggatatgtggacctctccgaagatgtctttggaaacgggaatatcttcacataaaaactaaacagaagcattctcagaaacttcttggtgatgtttgcattcaaatcccagagttgaaccttcctttgatagttcaggtttgaaacactctttctgtaggatctgcaagtggctatttggaccactctgtggccttcgttcgaaacgggtatatcttcgcataaaatctagacagaaaagcattctcagaaaatactttgtgatgattgagtttaaatcacagagctgaccattcctttggatggagcaggtttgagacacactttttgtagaatctacaagtggatatttggacctctctgaggatttcgttggaaacgggataactgcacctaactaaacggaagcattcccagaaattgctttgtcatgattgcattcacctcacagagttgaacattcctattgatagagcagtttggaaaccctcttcttgtggaatgtgcaagtggagatttggagcgctttgaggcctatgatagtaaagggaatagcttcatagaaaaactagacagatgcattctcaggaactttttggtgatgtttgtattcaactcccagagttgaactttcctttggaaagagcagctatgaaacactctttttctagaatctgcaagtggacgtttggagggctttgtggtttgtggtggaaaaagaaatatcttcacctaaatactagatagaagcattctcagaagcttctctgagatgactgcattcaactcacggagttgaacactccttttgagagcgcagttttgaaactctctttctgtggcatctgcaaggggacatgtagacctctttgaagatttcgttggaaacggaatcatcttcacataaaaactatacagaagcagtctcagaatcttctttgtgatgtttgcattcaaatccccgagttgaactttcctttcaaagttcacgtttgaaacactctttttgcaggatctacaagtggatatttggaccactctgtgtccttcgttcgaaacgggtatatcttcacatgacatctagacagaagctttctcagaaaattctttgggatgattgagttgaactcacagagctgaacattccttgcgatgtagcagtttagaaacacactttctgcagaatctgcaagtgcatatttggacctctctgaggaattcgtaggaaacggtataatttcagctgactaaacagaagcattctcagaaccttcttcgtgatgtctgcattcaactcacactgtggaacctttctttgatagttcaggtttgaaacactctttttgtagaaactgcaaggggataattgcacttctttgaggcctaccgtagtaaaggaaataacttcctatagaaagaagacagaagcattctcagaaccctcttcgtgatgtttgcattcaactcacagtgctgaacctttctttgatagttcagctttgaaacactcttcttgtagaaactgcaagtggatatttggtcctctctgaggatttcgttggaaacgggataaaccgcacagaactaaacagaagaattctcagagccctcttcgtgatgtttgcattcaactcacagtgctgaacctttctttgatagtgcagctttgaaacactctttttgtagaaactgcaagtggatatttggtcctctctgaggatttcgttggaaacgggataaaccgcacagaactaaaacagaagcattcacagaaaactcttggtgacgactgagtttaactcacagagctgaacattcctttggatggagcagtttcgaaacacactatttgtagaatctgcaagtggatatttgggcctctctgaggatttcgttggaaacgggataaaacgcacagaactaaaacagaagcattctcagaaactactttgtgatgattgcattcaagtcacagagttgaacattccctttgacagagcagtttggaaactctctttgtgtagaatctgcaagtggagatatggaccgctttgaggcctatggtagtaaaggaaatagcttcatataaaacctagacagtagcattctcagaaacttctttgtgatgcttgcattcaactcacagagttgaactttcctttcgagagagaagctttgaaacactctttttccagaatgtgcaagtggacatttggggagctttgaggcctgtggtggaaaaggaattatcttcccgtaaaagctagatagaagcattgtcagaaacttctttgtgatgattgcattcaactcacagagttgaaggttccttttcaaacagcagtttccaatcactctttctgtggaatctgcaagtggatatttcgacctctttgaagatttcgttggaaacgggagaatcttcacagaaaagctaaacagaagcattctcagaaacttctctgtgatgtttgtgttcaactcccagagtttcacgttgcttctcatagagtagttctgaaacatgcttttcgtagtgtctgcaagtggacatttggagcgctttcaggcctgtggtggaaaacgaattatggtcacataaaaactggagagaagccttctcagaaacttctctgtgatgattgcattcaactcacagagttgaaccctcctatggatagagcagtgttgaaactctctttttgtggaatctgcaagtggatatgtggacctctccgaagatgtctttggaaacgggaatatcttcacataaaaactaaacagaagcattctcagaaacttcttggtgatgtttgcattcaaatcccagagttgaaccttcctttgagagttcaggtttgaaacactctttttgtaggatctgcaagtggatatttggaccacgctgtgtccttcgttcgaaacgggtacatcttcgcataaaatctagacagaagcattctcagaaaatactttgtgatgattgagttgaactcacagagctgaacattcctttggatggagcaggtttgagacacactttttgtagaatctacaagtggatatttggacctctctgaggatttcgttggaaacgggataactgcacctaactaaacggaagcattctcagaaactgctttgtgatgattgcattcacctcacagagttgaacattcctattgatagagcagtttggaaacactcttgttgtggaatgtgcaagtggagatttggagcgctttgaggcctatggtagtaaagggaatagcttcatagaaaaactagacagatgcattctcaggaactttttggtgatgtttgtattcaactcccagagttgaactttcctttggaaagagcagctatgaaacactctttttctagaatctgcaagtggacgtttggagggctttgtggtttgtggtggaaaaggaaatatcttcacctaaatactagatagaagcattctcagaagcttctctgtgatgactgcattcaactcacggagttgaacactccttttgagagcgcagttttgaaactctctttctgtggcatctgcaaggggacatgtagacctctttgaagatttggttggaaacggaatcatcttcacataaaaactatacagaagcagtctcagaatcttctttgtgatgtttgcattcaaatccccgagttgaactttcctttcaaagttcacgtttgaaacactctttttgcaggatctacaagtggatatttggaccactctgtgtccttcgttcgaaacgggtatatcttcacatgacatctagacagaagctttctcagaaaattctttgggatgattgagttgagcaaacagagctgaacactccttgcgatgtagcagtttagaaacacactttctgcagaatctgcaagtgcatatgtggacctctctgaggaattcgttggaaacgggataatttcagctgactaaacagaagcattctcagatccttcttcgtgatgtctgcattcaactcacagtgtggaacctttctttgatagttcaggtttgaaacactctttttgtagaggctgcaaggggataattgcacttctttgaggcctaccgtcgtaaaggaaataacttcctataaaaagaagacagaagcattctcagaaccctcttcgtgatgtttgcattcaactcacagtgctgaacctttctttgatagttcagctttgaaacactcttcttgtagaaactgcaagtggatatttggtcctctctgaggatttcgttggaaacgggataaaccgcacagaactaaacagaagcattctcagaaccttcttcgtgatgtttgcattcaactcacagtgttgaacctttctttgatagttcaggtttgaaacggtctttctgtagaaactgcaagtagatatttggacctctctgaggatttcgttggaaacgggataacccgcacagaactaaaacagaagcattcacagaaaactcttggtgacgactgagtttaactcacagagctgaacattcctttggatggagcagtttcgaaacacactatttgtagaatgtgcaagtggatatttgggcctctctgaggatttcgttggaaacgggataaaccgcacagaactaaacagaagcattctcagaaactactttgtgatgattgcattcaagtcacagagttgaacattccctttgatagagcagtttggaaactctctttgtgtagaatctgcaagtggagatatggaccgctttgaggcctatggtagtaaaggaaatagcttcatataaaagctagacagtagcattctcagaaacttctttgtgatgcttgcattcaactcacagagttgaactttcctttcgagagagaagctttgaaacactcttttccagaaactgcaagtggacatttggagggcattgaggcctgtggtggaaaaggaattatcttcccgtaaaagctagacagaagcattgtcagaaacttctttgtgatgattgcattcaactcacagagttgaaggttccttttcaaagagcagtttccaatcactctttctgtggaatctgcaagtggatatttggacctctttgaagatttcgttggaaacgggagaatcttcacagaaaagctaaacagaagcattctcagaaacttctctgtgatgtttgtgttcaactcccagagtttcacattgcttttcgtagagtagttctgaaacatgcttttcgtagtgtctacaagtggacatttggagcgctttcaggcctgtggtggaaaacgaattatggtcacataaaaactggagagaagccttctcagaaacttctctgtgatgattgcattcaactcacagatttgaaccctcctatggatagagcagtgttgaaactctctttttgtggaatctgcaagtggatatgtggacctctccgaagatgtctttggaaacgggaatatcttcacataaaaactaaacagaagcattctcagaaacttcttggtgatgtttgcattcaaatcccagagttgaaccttcctttgatagttcaggtttgaaacactctttttgtaggatctgcaagtggctatttggaccactctgtggccttcgttcgaaacgggtatatcttcgcataaaatctagacagaagcattctcagaaaatactttgtgatgattgagttgaactcacagagctgaacattcctttggatggagcaggattgagacacactttttgtagaatctacaagtggatatttggacctctctgaggatttcgttggaaacgggataactgcacctaactaaacggaagcattctcagaaactgctttgtgatgattgcattcacctcacagagttgaacattcctattgatagagcagtttggaaacactcttgttgtggaatgtgcaagtggagatttggagcgctttgaggcctatggtagtaaagggaatagcttcatagaaaaactagacaggatgcattctcaggaactttttggtgatgtttgtattcaactcccagagttgaactttcctttggaaagagcagctatgaaacactctttttctagaatctgcaagtggacgtttggagggctttgtggtttgtggtggaaaaggaaatatcttcacctaaatactagatagaagcattctcagaagcttctctgtgatgactgcattcaactcacggagttgaacactccttttgagagcgcagttttgaaactctctttctgtggcatctgcaaggggacatgtagacctctttgaagatttcgttggaaacggaatcatcttcacataaaaactatacagaagcagtctcagaatcttctttgtgatgtttgcattcaaatcccagagttgaacttccctttcaaagttcacgtttgaaacactctttttgcaggatctacaagtggatatttggaccactctgtgtccttcgttcgaaacgggtatatcttcacatggcatctagacagaagctttctcagaaaatcctttgggatgattgagtggaactcacagagctgaacattccttgcgatgtagcagtttagaaacacactttctgcagaatctgcaagtgcatatgtggacctctctgaggaattcgttggaaacgggataatttcagctgactaaacagaagcattctcagaaccttcttcgtgatgtctgcattcaactcacagtgtggaacctttctttgatagttcaggtttgaaacactctttttgtagaaactgcaaggggataattgcacttctttgaggcctaccgtagtaaaggaaataacttcctatagaaagaagacagaagcattctcagaaccctcttcgtgatgtttgcattcaactcacagtgctgaacctttctttgatagttcagctttgaaacactcttcttgtagaaactgcaagtggatatttggtcctctctgaggatttcgttggaaacgggataaaccgcacagaactaaacagaagaattctcagagccctcttcgtggtgtttgcattcaactcacagtgctgaacctttctttgatagtgcaactttgaaacactctttttgtagaaactgcaagtggatatttggtcctctctgaggatttcgttggaaacgggataaaccgcacagaactaaaacagaagcattcacagaaaactcttggtgatgactgcgtttaagtcacagagctgaacattcctttgtatggagcagtttcaaaacacactatttgtagaatctgcaagtggatatttgggcctctctgaggatttcgttggaaacgggataaaacgcacagaactaaaacagaagcattctcagaaactactttgtgatgattgcattcaagtcacagagttgaacattccctttgacagagcagtttggaaactctctttgtgtagaatctgcaagtggagatatggaccgctttgaggcctatggtagtaaaggaaatagcttcatataaaagctagacagtagccttctcagaaacttctttgtgatgcttgcattcaactcacagagttgaactttcctttcgagagagaagctttgaaacactctttttccagaatctgcaagtggacatttggagggctttgaggcctgtggtggaaaaggaattatcttcccgtaaaagcctagatagaagcattgtcagaaacttctttgtgatgattgcattcaagtcacagagttgaaggttccttttcaaagagcagtttccaatcactctttctgtggaatctgcaagtggatatttggacctctttgaagatttcgttggaaacgggagaatcttcacagaaaagctaaacagaagcattctcagaaacttctctgtgatgtttgtgttcaactcccagagtttcacattgcttttcatagagtagttctgaaacatgcttttcgtagtgtctgcaagtggacatttggagcgctttcaggcctgtggtggaaaacgaattatggtcacataaaaactggagagaagccttctcagaaacttctctgtgatgattgcattcaactcacagatttgaaccctcctatggatagagcattgttgaaactctctttttgtggaatctgcaagtggatatgtggacctctccgaagatgtctttggaaacgggaatatcttcacataaaaactaaacagaagcattctcagaaacttcttggtgatgtttgcattcaaatcccagagttgaaccttcctttgatagttcaggtttgaaacactctttttgtaggatctgcaagtggatatttggaccactctgtggccttcgttcgaaacgggtatatcttcgcataaaatctagacagaaacattctcagaaaatactttgtgatgattgagtttaaatcacagagctgaacattcctttggatggagcaggtttgagacacactttttgtagaatctacaagtggatatttggacctctctgaggatttcgttggaaacgggataactgcacctaactaaacggaagcattctcagaaactgctttgtgatgattgcattcacctcacagagttgaacattcctattgatagagcagtttggaaacactcttgttgtggaatgtgcaaatggagatttggagcgctttgaggcctatggtagtaaagggaatagcttcatagaaaaactagacagatgcattctcaggaaccttttggtgatgtttgtattcaactcccagagttgaactttcctttggaaagagcagctatgaaacactctttttctagaatctgcaagtggacgtttggagggctttgtggtttgtggtggaaaaggaaatatcttcacctaaatactagatagaagcattctcagaagcttctctgtgatgactgcattcaactcacggagttgaacactccttttgagagcgcagttttgaaactctctttctgtggcatctgcaaggggacatgtagacctctttgaagatttcgttggaaacggaatcatcttcacataaaaactatacagaagcagtctcagaatcttctttgtgatgtttgcattcaaatcccagagttgaactttcctttcaaagttcacgtttgaaacactctttttgcaggatctacaagtggatatttggaccactctgtgtccttctttcgaaacgggtatatcttcacatgacatctagacagaagctttctcagaaaattctttgggatgattgagttgaggaaacagagctgaacactccttgcgatgtagcagtttagaaacacactttctgcagaatctgcaagtgcatatgtggacctctctgaggaattcattggaaacgggataatttcagctgactaaacagaagcattctcagaaccttcttcgtgatgtctgcattcaactcacagtgtggaacctttctttgatagttcaggtttgaaacactctttttgtagaaactgcaaggggataattgcacttctttgaggcctaccgtagtaaaggaaataacttcctataaaaagaagacagaagcattctcagaaccctcttcgtgatgtttgcattcaactcacagtgctgaaactttctttgatagttcagctttgaaacactctttttgtagaaactgcaagtggatacttggtcctctctgaggatttcgttggaaaaggggtaaaccgcacagaactaaacagaagaattctcagagccctcttcgtgatgtttgcattcaactcacagtgctgaacctttctttgatagtgcagctttgaaacactctttttgtagaaactgcaagtggatgtttggtcctctctgaggatttcgttggaaacgggataaaccgcacagaactaaaacagaagcattgtcagaaacttctttgtgatgattgcattcaactcacagagttgaaggttccttttcaaacagcagtttccaatcactctttctgtggaatctgcaagtggatatttgggcctctctgaggatttcgttggaaacgggataaaacgcacagaactaaaacagaagcattctcagaaacttctctgtgatgtttgtgttcaactcccagagtttcacgttgcttttcatagagtagttctgaaacatgcttttcatagtgtctgcaagtggacatttggagcgctttcaggcctgtggtggaaaacgaattatggtcacataaaaactggagagaagccttctcagaaacttctctgtgatgattgcattcaactcacagagttgaaccctcctatggatagagcagtgttgaaactctctttttgtggaatctgcaagtggatatgtggacctctccgaagatgtctttggaaacgggaatatcttcacataaaaactaaacagaagcattctcagaaacttcttggtgatgtttgcattcaaatcccagaggtgaaccttcctttgatagttcaggtttgaaacactctttttgtaagatctgcaagtggctatttagaccactctgtggccttcgttcgaaacgggtatatcttcgcataaaatctagacagaagcattctcagaaaatactttgtgatgattgagttgaactcacagagctgaacattcctttggatggagcaggtttgagacacactttttgtagaatctacaagtggatatttggacctctctgaggatttcattggaaacgggataactgcacctaactaaacggaagcattctcagaaactgctttgtgatgattgcattcacctcacagagttgaacattcctattgatagagcagtttggaaacactcttgttgtggaatgtgcaagtggagatttggagcgctttgaggcctatggtagtaaagggaatagcttcatagaaaaactagacagatgcattctcaggaactttttggtgatgtttgtattcaactcccagagttgaactttcctttggaaagagcagctatgaaacactctttttctagaatctgcaagtggacgtttggagggctttgtggtttgtggtggaaaaggaaatatcttcacctaaatactagatagaagcattctcagaagcttctctgtgatgactgcattcaactcacggagttgaacactccttttgagagcgcagttttgaaactctctttctgtggcatctgcaaggggacatgtagacctctttgaagatttcgttggaaacggaatcatcttcacataaaaactatacagaagcagtctcagaatcttctttgtgatgtttgcattcaaatcccagagttgaactttcctttcaaagttcacgtttgaaacactctttttgcaggatctacaagtggatatttggaccactctgtgtccttcgttcgaaacgggtatatcttcacacgacatctagacagaagctttctcagaaaattctttgggatgattgagtggaactcacagagctgaacattccttgcgatgtagcagtttagaaacacactttctgcagaatctgcaagtgcatatttggacctctctgaggaattcgttggaaacgggataatttcagctgactaaacagaagcattctcagaaccttcttcgtgatgtctgcattcaactcacagtgtggaacctttctttgatagttcaggtttgaaacactctttttgtagaaactgcaaggggataattgcacttctttgaggcctaccgtagtaaaggaaataacttcctatagaaagaagacagaagcattctcagaaccctcttcgtgatgtttgcattcaactcacagtgctgaagctttctttgatagttcagctttgaaacactcttcttgtagaaactgcaagtggatatttggtcctctctgaggatttcgttggaaacgggataaaccgcacagaactaaacagaagaattctcagagccctcttcgtgatgtttgcattcaactcacagtgctgaacctttctttgatagtgcagctttgaaacactctttttgtagaaactgcaagtggatgtttggtcctctctgaggatttcgttggaaacgggataaaccgcacagaactaaaacagaagcattgtcagaaacttctttgtgatgattgcattcaactcacagagttgaaggttccttttcaaacagcagtttccaatcactctttctgtggaatctgcaagtggatatttgggcctctctgaggatttcgttggaaacgggataaaacgcacagaactaaaacagaagcattctcagaaacttctctgtgatgtttgtgttcaactcccagagtttcacgttgcttttcatagagtagttttgaaacatgcttttcgtagtgtctgcaagtggacatttggagcgctttcaggcctgtggtggaaaacgaattatggtcacataaaaactggagagaagccttctcagaaacttctctgtgatgattacattcaactcacagagttgaaccctcctatggatagagcagtgttgaaactctctttttgtggaatctgcaagtggatatgtggacctctccgaagatgtctttggaaacgggaatatcttcacataaaaactaaacagaagcattctcagaaacttcttggtgatgtttgcattcaaatcccagagttgaaccttcctttgatagttcaggtttgaaacactctttttgtaggatctgcaagtggctatttggaccactctgtggccttcgttcgaaacgggtatatcttcgcataaaatctagacagaagcattctcagaaaatactttgtgatgattgagtttaaatcacagagctgaccattcctttggatggagcaggtttgagacacactttttgtagaatctacaagtggatatttggacctctctgaggatttcgttggaaacgggataactgcacctaactaaacggaagcattctcagaaactgctttgtgatgattgcattcacctcacagagttgaacattcctattgatagagcagtttggaaacactcttgttgtggaatgtgcaagtggagatttggagcgctttgaggcctatggtagtaaagggaatagcttcatagaaaaactagacagatgcattctcaggaactttttggtgatgtttgtattcaactcccagagttgaactttcctttggaaagagcagctatgaaacactctttttctagaatctgcaagtggacgtttggagggctttgtggtttgtggtggaaaaggaaatatcttcacctaaatactagatagaagcattctcagaagcttctctgtgatgactgcattcaactcacggagttgaacactccttttgagagcgcagttttgaaactctctttctgtggcatctgcaaggggacatgtagacctctttgaagatttcgttggaaacggaatcatcttcacataaaaactatacagaagcagtctcagaatcttctttgtgatgtttgcattcaaatcccagagttgaactttcctttcaaagttcacgtttgaaacactctttttgcaggatctacaagtggatatttggaccactctgtgtccttcgttcgaaacgggtatatcttcacacgacatctagacagaagccttctcagaaaattctttgggatgattgagtggaactcacagagctgaacattccttgcgatgtagcagtttagaaacacactttctgcagaatctgcaagtgcatatttggacctctctgaggaattcgttggaaacgggataatttcagctgactaaacagaagcattctcagaaccttcttcgtgatgtctgcattcaactcacagtgtggaacctttctttgatagttcaggtttgaaacactctttttgtagaaactgcaaggggataattgcacttctttgaggcctaccgtagtaaaggaaataacttcctatagaaagaagacagaagcattctcagaaccctcttcgtgatgtttgcattcaactcacagtgctgaacctttctttgatagttcagctttgaaacactcttcttgtagaaactgcaagtggatatttggtcctctctgaggatttcgttggaaacgggataaaccgcacagaactaaccagaagaattctcagagccctcttcgtgatgtttgcattcaactcacagtgctgaacctttctttgatagtgcagctttgaaacactctttttgtagaaactgcaagtggatatttggtcctctctgaggatttcgctggaaacgggataaaccgcacagaactaaaacagaagcattctcagaaccttcttcgtgatgtttgcattcaactcacagtgttgaacctttctttgatagttcaggttggaaacggtctttctgtagaaactgcaagtagatatttggacctctctgaggatttcgttggaaacgggataaaccgcacagaactaaaacagaagcattcacagaaaactcttggtgacgactgagtttaactcacagagctgaacattcctttggatggagcagtttcgaaacacactatttgtagaatgtgcaagtggatatttgggcctctctgaggatttcattggaaacgcgataaaccgcacagaactaaacagaagcattctcagaaactactttgtgatgattgcattcaagtcacagagttgaacattccctttgacagagcagtttggaaactctctttgtgtagaatctgcaagtggagatatggaccgctttgaggcctatggtagtaaaggaaatagcttcatataaaagctagacagtagcattctcggaaacttctttgtgatgcttgcattcaactcacagagttgaacattcctttcgagagagaagctttgaaacactctttttccagaatctgcaagtggacatttggagggctttgaggcctgtggtggaaaaggaattatcttcccgtaaaagctagatagaagcattgtcagaaacttctttgtgatgattgcattcaactcacagagttgaaggttccttttcaaagagcagtttcaaatcactctttccgtggaatctgcaagtggatatttggacctctttgaagatttcgttggaaacgggagaatcgtcacagaaaagctaaacagaagcattctcagaaacttctctgtgatgtttgtgttcaactcccagagtttcacattgcttttcatagagtcgttctgaaacatgcttttcgtactgtctacaagtggacatttggagcgctttcaggcctgtggtggaaaacgaattatggtcacataaaaactggagagaagccttctcagaaacttctctgtgatgattgcattcaactcacagagttgaaccctactatggatagagcagtgttgaaactctgtttttgtggaatctgcaggtggatatgtggacctctccgaagatgtctttggaaacgggaatatcttcacataaaaactaaacagaagcattctcagaaacttcttggtgatgtttgcattcaaatcccagagttgaaccttcctttgatagttcaggtttgaaacactctttttgtaggatctgcaagtggatatttggaccactctgtggccttcgttcgaaacgggtacatcttcgcataaaatctagacagaagcattctcagaaaatactttgtgatgattgagttgaactcacagagctgaacattcctttggatggagcaggtttgagacacactttttgtagaatctacaagtggatatttggacctctctgaggatttcgttggaaacgggataactgcacctaactaaacggaagcattctcagaaactgctttgtgatgattgcattcacctcacagagttgaacattcctattgatagagcagtttggaaacactcttgttgtggaatgtgcaagtggagatttggagcgctttgaggcctatggtagtaaagggaatagcttcatagaaaaactagacagatgcattctcaggaactttttcgtgatgtttgtattcaactcccagagttgaactttcctttggaaagagcagctatgaaacactctttttctagaatctgcaagtggacgtttggagggctttgtggtttgtggtggaaaaggaaatatcttcacctaaatactagatagaagcgattctcagaagcttctctgtgatgactgcattcaactcacggagttgaacactccttttgagagcgcagttttgaaactctctttctgtggcatccgcaagggaacatgtggacctctttgaagatttcgttggaaacggaatcatcttcacataaaaactatacagaagcagtctcagaatcttctttgtgatgtttgcattcaaatccccgagttgaactttcctttcaaagttcacgtttgaaacactctttttgcaggatctacaagtggatatttggaccactactgtgtccttcgttcgaaacgggtatatcttcacatgacatctagacagaagctttctcagaaaattctttgggatgattgagttgaactcacagagctgagcattccttgcgatgtagcagtttagaaacacactttctgcagaatctgcaagtgcatatttggacctctgtgaggaattcgttggaaacgggataatttcagctgactaaacagaagcattctcagaaccttcttcgtgatgtctgcattcaacacaaagtgtggaacttttctttgatagttcaggttttaaaaactctttttgtagaaactgcaaggggataattgcactctttgaagagtaccgtagtaaaggaaataacttcctataaaaagaagacagaagcattctcagaaccctcttcgtgatgtttgcattcaactcacagtgctgaacctttctttgatagttcagctttgaaacactctttttgtagaaactgcaagtgaatatttggtcctctctgaggatttcgttggaaacgggataaaacgcacagaactaaacagaagcattctcagaaccttcttcgtgatgtttgcattcaactcacagtgttgaacctttctttgatagttcaggtttgaaacggtctttctgtagaaactgcaagtagatatttggacctctctgaggatttcgttggaaacgggataacccgcacagaactaaaacagaagcattcacagaaaactcttggtgacgactgagtttaactcacagagctgaacattcctttggatggagcagtttcgaaacacactatttgtagaatgtgcaagtggatatttgggcctctctgaggatttcgttggaaacggaataaaccgcacagaactaaacagaagcattctcagaaactactttgtgatgattgcattcaagtcacagagttgaacattccctttgacagagcagtttggaaactctctttgtgtagaatctgcaagtggagatatggaccgctttgaggcctatggtagtaaaggaaatagcttcatataaaagctagacagtagcattctcagaaacttcgttgtgatgcttgcattcaactcacagagttgaactttcctttcgagagagaagccttgaaacactctttttccagaatctgcaagtggacatttggagggctttgaggcctgtggtggaaaaggaattatcttcccgtaaaagctagatagaagcattgtcagaaacttctttgtgatgattgcattcaactcacagagatgaaggttcctttacaaacagcagtttccaaacactctttctgtggaatctgcaagtggatatttggacctctttgaagatttcgttggaaacgggagaatcttcacagaaaagctaaacagaagcattctcagaaacttctctgtgatgtttgtgttcaactcccagagtttcacattgcttttcatagagtagttctgaaacatgcttttcgtagtgtctgcaagtggacatttggagcgctttcaggcctgtggtggaaaaccgaattatggtcacataaaaactggagagaagccttctcagaaacttctctgtgatgattgcattcaactcacagatttgaaccctcctatggatagagcattgttgaaactctctttttgtggaatctgcaagtggatatgtggacctctccgaagatgtactttggaaacgggaatatcttcacataaaaactaaacagaagcattctcagaaacttcttggtgatgtttgcattcaaatcccagagttgaaccttcctttgatagttcaggtttgaaacactctttttgtaggatctgcaagtggctatttggaccactctgtggccttcgttcgaaactggtatatcttcgcataaaatctagacagaagcattctcagaaaatactttgtgatgattgagtttaaatcacagagctgaccattcctttggatggagcaggtttgagacacactttttgtagaatctacaagtggatatttggacctctctgaggatttcgttggaaacgggataactgcacctaactaaacggaagcattctcagaaactgctttgtgatgattgcattcacgtcacagagttgaacattcctattgatagagcagtttggaaacactcttgttgtggaatgtgcaagtggagatttggagcgctttgaggcctatggtagtaaagggaatagcttcatagaaaaactagacagatgcattctcaggaactttttggtgatgtttgtattcaactcccagagttgaactttcctttggaaagagcagctatgaaacactctttttctagaatctgcaagtggacgtttggagggctttgtggtttgtggtggaaaaggaaatatcttcacctaaatactagatagaagctttctcagaagcttctctgtgatgactgcattcaactcacggagttgaacactccttttgagagcgcagttttgaaactctctttctgtggcatctgcaaggggacatgtagacctctttgaagatttcgttggaaacggaatcatcttcacataaaaactatacagaagcagtctcagaatcttctttgtgatgtttgcattcaaatcccagagttgaactttcctttcaaagttcacgtttgaaacactctttttgcaggatctacaagtggatatttggaccactctgtgtccttcgttcgaaacgggtatatcttcacacgacatctagacagaagctttctcagaaaattctttggaatgattgagtggaactcacagagctgaacattccttgcgatgtagcagtttagaaacacactttctgcagaatctgcaagtgcatatttggacctctctgaggaattcgttggaaacgggataatttcagctgactaaacagaagcattctcagaaccttcttcgtgatgtctgcattcaactcacagtgtggaacctttctttgatagttcaggtttgaaacactctttttgtagaaactgcaaggggataattgcacttctttgaggcctaccgtagtaaaggaaataacttcctatagaaagaagacagaagcattctcagaaccctcttcgtgatgtttgcattcaactcatagtgctgaacctttctttgatagttcagctttcaaacactcttcttgtagaaactgcaagtggatatttggtcctctctgaggatttcgttggaaacggggtaaaccgcacagaactaaacagaagcattctcagaaccttcttcgtgatgtttgcattcaactcacagtgttgaacctttctttgatagttcaggtttgaaacggtctttctgtagaaactgcaagtagatatttggacctctctgaggatttcgttggaaacgggataaaccgcacagaactaaaacagaagcattcacagaaaactcttggtgacgactgagtttaactcacagagctgaacattcctttggatggagcagtttcgaaacacactatttgtagaatgtgcaagtggatatttgggcctctctgaggatttcgttggaaacgggataaaccgcacagaactaaacagaagcattctcagaaactactttgtgatgattgcattcaagtcacagcagttgaacattccctttgacagagcagtttggaaactctctttctgtagaatctgcaagtggagatatggaccgctttgaggcctatggtagtaaaggaaatagcttcatataaaagctagacagtagcattctcagaaacttctttgtgatgcttgcattcaactcacagagttgaactttcctttcgagagagaagctttgaaacactctttttccagaatctgcaagtggacatttggagggctttgaggcctgtggtggaaaaggaattatcttcccgtaaaagctagatagaagcattgtcagaaacttctttgtgatgattgcattcaagtcacagagttgaaggttccttttcaaagagcagtttccaatcactctttctgtggaatctgcaagtggatatttggacctctttgaagatttcgttggaaacgggagaatcttcacagaaaagctaaacagaagcattctcaaaaacttctctgtgatgtttgtgttcaactcccagagtttcacattgcttctcatagagtatttctgaaacatgcttttcgtagtgtctgcaagtggacatttggagcgctttcaggcctgtggtggaaaacgaattatggtcacataaaaactggagagaagccttctcagaaacttctctgtgatgattgcattcaactcacagagttgaaccctcctatggatagagcagtgttgaaactctctttttgtggaatctgcaagcggatatgtggacctctccgaagatgtctttggaaacgggaatatcttcacataaaaactaaacagaagcattctcagaaacttcttggtgatgtttgcattcaaatcccagagttgaaccttcctttgagagttcaggtttgaaacactctttttgtaggatctgcaagtggatatttggaccactatgtggccttcgttcgaaacgggtacatcttcgcataaaatctagacagaagcattctgagaaaatactttgtgatgattgagttgaactcacagagctgaacattcctttggatggagcaggtttgagacacactttttgtagaatctacaagtggatatttggacctctctgaggatttcgttggaaacgggataactgcacctaactaaacggaagcattctcagaaactgctttgtgatgattgcattcacctcacagagttgaacattcctattgatagagcagtttggaaacactcttgttgtggaatgtgcaagtggagatttggagcgctttgaggcctatggtagtaaagggaatagcttcatagaaaaactagacagatgcattcacaggaactttttggtgatgtttgtattcaactcccagagttgaactttcctttggaaagagcagctatgaaacactctttttctagaatctgcaagtggacgtttggagggctttgtggtttgtggtggaaaaggaaatatcttcacctaaatgctagatagaagcattctcagaagcttctctgtgatgactgcattcaactcacggagttgaacactccttttgagagcgcagttttgaaactctctttctgtggcatctgcaaggggacatgtagacctctttgaagatttcgttggaaacggaatcatcttcacatcaaaactatacagaagcagtctcagaatcttctttgtgatgtttgcattcaaatcccagagttgaactttcctttccaagttcacgtttgaaacactctttttgcaggatctacaagtggatattttgaccactctgtgtccttcgttcgaaacgggtatatcttcacatgacatctagacagaagctttctcagaaaattctttgggatgattgagttgagcaaacagagctgaacactccttgcgatgtaacagtttagaaacacactttctgcagaatctgcaagtgcatatgtggacctctctgaggaattcgttggaaacgggataatttcagctgactaaacagaagcattctcagaaccttcttcgtgatgtctgcattcaactcacagtgtggaacctttctttgatagttcaggtttgaaacactctttttgtagaaactgcaaggggatcattgcacttctttgaggcctaccgtagtaaaggagataacttactataaaaagaagacagaagaattctcagagccctcttcgtgatgtttgcattcaactcacagtgctgaacctttctttgatagtgcagctttgaaacactctttttgtagaaactgcaagtggatgtttggtcctctctgaggatttcgttggaaacgggataaaccgcacagaactaaaacagaagcattgtcagaaacttctttgtgatgattgcattcaactcacagagttgaaggttccttttcaaacagcagtttccaatcactctttctgtggaatctgcaagtggatatttgggcctctctgaggatttcgttggaaatgggataaaacgcacagaactaaaacagaagcattctcagaaacttctctgtgatgtttgtgttcaactcccagagtttcacgttgcttttcatagagtagttctgaaacatgcttttcgtagtgtctgcaagtggacatttggagcgctttcaggcctgtggtggaaaacgaattatggtcacataaaaactggagagaagccttctcagaaacttctctgtgatgattgcattcaactcacagagttgaaccctcctatggatagagcagtgttgaaactctctttttgtggaatctgcaagtggatatgtggacctctccgaagatgtctttggaaacgggaatatcttcacataaaaactaaacagaagcattctcagaaacttcttggtgatgtttgcattcaaatcccagagttgaaccttcctttgatagttcaggtttgaaacactctttctgtaggatctgcaagtggctatttggaccactctgtggccttcgttcgaaacgggtatatcttcgcataaaatctagacagaagcattctcagaaaatactttgtgatgattgagtttaaatcacagagctgaccattcctttggatggagcaggtttgagacacactttttgtagaatctacaagtggatatttggacctctctgaggatttcgttggaaacgggataactgcacctaactaaacggaagcattctcagaaactgctttgtgatgattgcattcacctcacagagttgaacattcctattgatagagcagtttggaaacactcttgttgtggaatgtgcaagtggagatttggcgcgctttgaggcctatggtagtaaagggaatagcttcatagaaaaactagacagatgcattctcaggaactttttggtgatgtttgtattcaactcccagagttgaactttcctttggaaagagcagctatgaaacactctttttctagaatctgcaagtggacgtttggagggctttgtggtttgtggtggaaaaggaaatatcttcacctaaatactagatagaagcattctcagaagcttctctgtgatgactgcattcaactcacggagttgaacactccttttgagagcgcagttttgaaactctctttctgtggcatctgcaagttgacatgtagacctctttgaagatttcgttggaaacggaatcatcttcacataaaaactatacagaagcagtctcagaatcttctttgtgatgtttgcattcaaatcccagagttgaactttcctttcaaagttcacgtttgaaacactctttttgcaggatctacaagtggatatttggaccactctgtgtccttcgttcgaaacgggtatatcttcacatgacatctagacagaagctttctcagaaaattctttgggatgattgagtggaattcacagagctgaacattccttgcgatgtagcagtttagaaacacactttctgcagaatctgcaagtgcatatttggacctctctgaggaattcgttggaaacgggataatttcagctgactaaacagaagcattctcagaaccttcttcctgatgtctgcattcaactcacagtgtggaacctttctttgatagttcaggtttgaaacactctttttgtagaaactgcaaggggataattgcacttctttgaggcctaccgtagtaaaggaagtatcttcctatagaaagaagacagaagcattctcagaaccctcttcgtgatgtttgcattcaactcacagtgctgaacctttctttgatagttcagctttgaaacactcttcttgtagaaactgcaagtggatatttggtcctctctgaggatttcgttggaaacgggataaaccgcacagaactaaacagaagaattctcagagccctcttcgtgatgtttgcattcaactcacagtgctgaacctttctttgatagtgcagctttgaaacactctttttgtagaaactgcaagtggatgtttggtcctctctgaggatttcgttggaaacgggataaaccgcacagaactaaaacagaagcattgtcagaaacttctttgtgatgattgcattcaactcacagagttgaaggttccttttcaaacagcagtttccaatcactctttctgtggaatctgcaagtggatatttgggcctctctgaggatttcgttggaaacgggataaaacgcacagaactaaaacagaagcattctcagaaacttctctgtgatgtttgtgttcaactcccagagtttcacgttgcttttcatagagtagttctgaaacatgcttttcgtagtgtctgcaagtggacatttggagcgctttcaggcctgtggtggaaaacgaattatggtcacataaaaactggagagaagccttctcagaaacttttctgtgatgattgcattcaactcacagagttgaaccctcctatggatagagcagtgttgaaactctctttttgtggaatctgcaagtggatatgtggacctctccgaagatgtctttggaaacgggaatatcttcacataaaaactaaacagaagcattctcagaaacttcttggtgatgtttgcattcaaatcccagagttgaaccttcctttgatagttcaggtttgaaacactctttttgtaggatctgcaagtggctatttggaccactctgtggccttcgttcgaaacgggtatatcttcgcataaaatctagacagaagcattctcagaaaatactttgtgatgattgagtttaaatcacagagctgaccattcctttggatggagcaggtttgagacacactttttgtagaatctacaagtggatatttggacctctctgaggatttcgttggaaacgggataactgcacctaactaaacggaagcattctcagaaactgctttgtgatgattgcattcacctcacagagttgaacattcctattgatagagcagtttggaaacactcttgttgtggaatgtgcaagtggagatttggagcgctttgaggcctatggtagtaaagggaatagcttcatagaaaaactagacagatgcattctcaggaactttttggtgatgtttgtattcaactcccagagttgaactttcctttggaaagagcagctatgaaacactctttttctagaatctgcaagtggacgtttggagggctttgtggtttgtggtggaaaaggaaatatcttcacctaaatactagatagaagcattctcagaagcttctctgtgatgactgcattcaactcacggagttgaacactccttttgagagcgcagttttgaaactctctttctgtggcatctgcaaggggacatgtagacctctttgaagatttcgttggaaacggaatcatcttcacataaaaactatacagaagcagtctcagaatcttctttgtgatgtttgcattcaaatcccagagttgaactttcctttcaaagttcacgtttgaaacactctttttgcaggatctacaagtggatatttggaccactctgtgtccttcgttcgaaacgggtatatcttcacacgacatctagacagaagctttctcagaaaattctttgggatgattgagtggaactcacagagctgaacattcccttgcgatgtagcagtttagaaacacactttctgcagaatctgcaagtgcatatttggacctctctgaggaattcgttggaaacgggataatttcagctgactaaacagaagcattctcagaaccttcttcgtgatgtctgcattcaactcacagtgtggaacctttctttgatagttcaggtttgaaacactctttttgtagaaactgcaaggggataattgcacttctttgaggcctaccgtagtaaaggaaataacttcctatagaaagaagacagaagcattctcagaaccctcttcgtgatgtttgcattcaactcacagtgctgaacctttctttgatagttcagctttgaaacactcttcttgtagaaactgcaagtggatatttggtcctctctgaggatttcgttggaaacgggataaaccgcacagaactaaacagaagcattctcagagccctcttcgtgatgtttgcattcaactcacagtgctgaacctttctttgatagtgcagctttgaaacactctttttgtagaaactgcaagtggatgtttggtcctctctgaggatttcgttggaaacgggataaaccgcacagaactaaaacagaagcattgtcagaaacttctttgtgatgattgcattcaactcacagagttgaaggttccttttcaaacagcagtttccaatcactctttctgtggaatctgcaagtggatatttgggcctctctgaggatttcgttggaaacgggataaaacgcacagaactaaaacagaagcattctcagaaacttctctgtgatgtttgtgttcaactcccagagtttcacgttgcttttcatagagtagttctgaaa
